United States Patent Application Publication US 2023/0081756 A1 - sequence listing, part 2

SEQ ID NO: 227 - DNA, 7027 bp, Butyricimonas faecihominis
aagatatatctcacaaatatataagataaaatttttattacaagtattaaaactcgttttattttttgatttgatcccgcctttccctatcttttctctatcctttttctatgtattgtcctgaaaaaagtttaccgtaaacttagtaaaccaattttaggaaactacaggttggatcaatgaaatttttttcaaaaaaaatattggaaatgggggtcccatttttttcattgtgcgtttattgtataaaagattgaaaatttatgcagattgattggggtaaaatattttcatatatcaatggacagactgataaaaaaacggtcgaagaggtagaattttggcggaaagaagatccccggaatgaagaattttatcaacgggcatctgattactatgcaaatcagccgactcgtaacgaatctttttctgaagaaaagctggatcagttctattcaaaattgcaaaagacgagaagacggaaacatcaacgggtattgtggcaacgaatgaccgtggcggcatctgttattttattgctctcgctgggaacttggtggtattatgacatgaatcaggataagatggacgggatgcagattgccatgaaaagcgagaatgcgggagaatcggtttttataatcacggaaaccggggataaactgactgccgaggaattaaattcgaaaatggatcagcaaactaataataaccagttgaattacaccaaatccgatagtatttatcgagtggatacggtgaaagaaaaagaaattatcccgacgcataccgttgttgttccaagaggaaaaacctttgaacttgtattatcggatggaactttcgtgttgcttaacccgcagagtgaattaacttacccggtgaaatttgattcaacttctacccgagaagtgactcttcgtggggaaggatattttgaggtgacaaaatcttcgaatcgtttcgtggtaaacacggataatatgaaattgcaggtgtatgggacaacgtttaatgttatttcacgggacaatttgccggatgaggccgtgttggtagagggtgttgtcagtattaccccgaaaaattcatcagatggaaaggaaactgtacttcatcccggtgacaaatcattcgtggataaattaggacagttgacagttacacaaacaaatctggcagaatacaccgctaaacggaatggttatattctctttaacgggaaaacgataaaacagataattcccagtcttgaattgttctacgatgttcatttctcggttaaaaacgaggttgctttggaaaaggaagaatacgtattttctataaaacaacacgcatcactccgagaagctttggacgtgatagaatttgtttcggatgttaaattcttaatcgaagggaaggaggtgaagattgtagaataagatgtcctgaaaaaattaacaggatgcccttttgcctagaacatcctgtgtaataaattaatgattcctcggtgagaaatgggaaccgattaattatcgataaatattaaaaacaaagttatgaaaaaaagtttattatttcgcaatggaggcggctctttttgcaaaatataccttttggtatgtttactggcgatgggatttacgaatcttaacgcacagaatgctgtaagtaagaaggtctctcttgattttaaaaatgtacccttaattgatgtattattagaaattcaaaaacaaactggagttaatttcgcttatgaaaagatacaagtggaacagttaaaaccggtgactattaatgtgaaaaatgcgacggtagaggatgttttaaaaacaattcttaaagatactggtttcacgtataaaatcacaggtgataatattgctattatccgtcaagaaaaaaagcttgaagtaaatcttttaaaagtaagcggtcgtattgttgatgagaagggaaatcctattcctggagccacgatcgtgatcgtgggaacaacacaaggggttgcttccgatgtggaaggacgttacacaattgctgctaagcctgacgatgtgttgcgagtttcttttatcgggtataagacagagactgttgatattaaaggaaaagaaagactaaatattcgtttgaatccaactgcggaaaatattgaagaggtaactgtagtagcgttcggagaacagaaaaaagaaagtgtggtttcggctattactaccgttcgcccaatggatttgaaatcttctagtagtgatttaacttctagttttgcaggaaaaattgcaggtattataggttggcagacaggaggtattcccggggcattgacagaggaagaaatgaacacgaagttctatattcggggtattagttcttctcaaggttcttccgagccgttggtgttaatcgatggagttgaatcttcccgattggatttagctcgtatggcgcctgaggatatagaaagttttagtgtattaaaagatgcttctgccacggcaatgtatggtgcacggggagctaacggggttatattggtgacaacgaagaaaggagaagagggaagcgtttatacttcagtacgttacgaggcagtggcctctatgccaacccgcgagatagaagtggttgacccgaaaacttatatgaggatgtataatcaggctttgttggctcgtaattcctctgcaactccggcatattcaattgaacggattgaacgtacgggaagttcgaactatccttcttgggtatatcctgccaatgattggtatgatattatgttcaaagattattctgtcaatcatcgtttaggcgtgaatgtacgtggcggatctcgtgtaatacagtattatgcctccgtgaattacgtgagagatcaaggtatgttaaaaacagatcgtttaaatcagtttgatgtcaatattacaaactctactgtttcttctcgtgtaaacttaaacgtggatttgagtgccggtattcgtttgttagtaaatacttcattttctattgataaatatcatgggccacagcagaatgttactgcagcttattctttggcttttaatgcttcaccggtagattttgctccaacctatccgggagataagaaatatagttggcctcatttgcgttttggaaatcgattggatggagaagcggcaaatccttacgcacagcttcatgtgggatatatggaacgggggcgttattctgtaactagtcgtgccgagtatattcataatctttcatctttattaaaaggtttggaacttcgtgctagtgtttcgctttcaaaacaaggatatgagcagagtacttacagtacttcaccattttactattatttaaatgcagagagtggagggtatgattttgaaacaggtgaacataccttaactttagtacggaatggacgtcgtactttggaattaaatagaatgaataatatgttgacatcgtccacccagtgggtatatgaagggcgtttgctgcatacggcggcttggggtaatcatcaaacttcgctgacggctgtatttcaagcccaacaagctaattctaatccgaatcagagtttattcgagagtatagagcatcgtaatctgagtttttccatgcgtggtacttatggatatatggatcgttattttttggaggctagtttcggttataacggttcggagcgttttgctaaaaaaaatcggatgggattttttccatctgttggaggagcttggattgtttcaaaagaaaatttcatgcggagagtagccaattggatgcctttttgcaaggttagagcatcttacggaaaagttggtaatgacggtataattgaaactcctcgtttcgtgtatatgccgcaggttgaaccgacggatataggagcatatcatccagaaccgggaaaagatgacaggttatctcgttatcaaatacagaattatggtgatcccgatatagagtgggaaatttcagaacaagtgaatcttgggttagaaactcgctttttcaagggtattttggaattgaatgctgatatttatcaggaaattcgtcacaatattatcgggaatcgtacggtaattcctgctaatatgggtgtggaaattcctcctttggataatatcggtaaggtgcgttcccggggtatcgatttggcgggaaaaattcagcatgctttttctccggatttttggattattttgaacgggactttcacatacaataaggctgtttataaagaattggaagaggcaactgataaacctaattggcaacgaaaagtaggacatgagatatcacaacaagtaggttatattgccgaaggattgttccgtgatcaggcggaaattgacaatgcgcccgatcaaccctcagctatgcccggagatatccgttatcgtgatgtgaatagggatgggattattgatactgaggacgccgtacatataggatttccggaaactccacgaattatatatggttttagtggttttatcaattacaagaattgggaattcaatttttctttccaagggtcgggtaatcgtggtttttttcttaatccgaaggcactttctccattcgtgggtgatcacgcaatgttgaaagcgatttacgaagaccattggagtgaggataatgttgttgaccgtccgttctggcctcgtctttctacacaaagtatgacagtttataatcctcaggaagattggtattcggtagatgctacagaaactcgtaaaagtacttattttatgcgggaatgtcgtttcttgcgttgtacttccttggaattggcttataatttgccagcaaatttgaaaaagaaaattcggatgcaaaatgtaaagttttttgctcgggcaaataatccttttatgattacgaatttcaagttatgggatgtggaattaggtgagaatgggtttaattacccgatacaaaagacctatgcggtaggtattaatattagtttttaatttaacagacagagaatatgaaacgtttattactagttttattgattcctttgtttttattgttaggatgtgatagctttcttgatatcgtaccggaagaggacatgacaacattaaattcggtttttgaaacaagggatgatgctttgctttggctccaaagttgttatacatttttgcaaaattcaactccttgtctttccgggaatgaggctttcttgggtgcggatgaagtggttacgggtgattatcaacggaatcgtggttggataggattgaatatcggagcaggtttacaaaatgcattggatccgtatggtgatatttggtcaaaaagatacggttcttatggtaaaagagattattatgcgggaataaatttgtgtaatgtgtttattgacaaaatcgatcaagtatacaacatggaggcttatgagaagcgggaatggaaggctgaaataaaggcattgaaagcttatatgtattttgaattggtacgtcattatggaccgatcattttagttccagaaaaccttgatccgaatttagatattcatgatatgcaagttcctcgtagccatgtggatacttgttttaatgccatcgttcgtctttgcgatgaagctgcagctgatttaacttcgcttgatttgaaagaatcctctcgaagagcttattttagtaaagaaagtgctttagctctaaaagcaatagctttgctttatcaagcttctgatctttttaatgggaatctagattatattaattttgtaaataagaatggagagccactttttagttctacgaaggataaagaaaagtggaaacgtgctgcagaagctgcagaagaggctattcaagtgtgtttggaaaacgggaaacatctggtgaatgaccaatatgcttctacaacattacaaacgtatatgcttaatattgagagatctattcagacatggggcttcttaagtgatgaggctttattgatgatcaagggaaagggaactgagggaggagatgattttttcttctatacgcttcctgatatcacaattgaccctaatcattatttaactggtacgagcatgagtccgagtttaaaaatggttgagatgttctacacagtaaatggacttcctatagatcaagatccaagttttggaggagggaatatctatgctatgactcaagaaacagatccttattatactgatgtggttgttatgcgagaggatattcctgtattgcatactcgtcgtgaacctcgtttttatgctactattgctgctgatcgctgttattggaggctaggaaagaatatagataatctttataaagtagaagcttatcgtggagaaacttttggattaaaagaaaaacgaattaattctactgctcctcagaatttaagtggttattggattaaaaaatggacgagttcggatatacctctttttaattacgtgaataacgtaaaaggaatgggagattatccttatcccgtaattcggatagctgaattgtatttaattgctgcggaagcttggaatgaatatttgacaacaccggataatagggtatacgataatttgaacgagatacgtaaacgtgccggaattcctacagtgcaagaatcttgggcaatggcgcgagataaaaataaggtaaatagtcaagttggtatgcgtgaaattattcgtcaggagtggaatatagagtttgctttcgaaggtcgtcgttattggaacttacgtcgatggaaaacggcacatttagagatgaatgagaatcaatacgggtggaacgtgttgggagatacacgagaaaaattttataataacagtaggccagtgattgttaattcgaagaataaatttgtagctcctcgagattatttatatcctatacgtagcgaagagattctgatatccggttgcgtgcaaaatccgggttggtaagtatatggttatgactttaaaatttagaatgatgaaaaatgcaatattattgtttttgatattcggtttatttgcttgtaatag

SEQ ID NO: 228 - DNA, 6988 bp, Butyricimonas faecihominis
gattgatataatatggaatacggttaagtacttaaaaccgattcagtggcgttatcgtgctaagttgtggtggcaacgattctttccacaaaatttgcaatcattagatacgactcctgataggcaaatattgaattttgtaccgtcgatcccgaatgaaatcacgtatttaggtgacaatacttttcaatttttaaatttgcagaaatcttttggtgagcaagttgattgggaatttgttgagttgggaagattgtggggatataatttgaactattttgagtttttgaatcaaaaaggtatagacgtgagggaaggggaaaaattgattcaagatttcattcaacatcttccgaaagccaggatggggatggagccttaccctttgtcattaaggtctataaattggattcgttttttgtcgtgtaatggtataaatgatgtcgacattgatgctgttttatatgctcaattgaaattgttaatccataaacttgaatatcatttgttaggaaaccatttgttggaaaatggttttgcattattattcggggcttattattttaatgatccggttttctataaaaaggcaaaagcgatactgataccggaattgcaggaacaggtgttgggtgatggagggcattttgagaggagtccaatgtatcattgtatcatgttatatcgggtgttagattgctataatttagtgcgtaataatgctttgttcggaagggagttggaagatattctgaaagaaagagcagaggttatgttggggtggttggaagaagttgtttatagtaatgggaggattccactactgaatgatgcagctgtgggaatagctccgactgccaaggaattaattgaatatagccaacgattagggatattttgtggtaaaaaagtgaggttgaaagagtccgggtatcggaaggttcgatggggaaagttcgagttgtttattgatgtaggggaagttggaccggattatcaaccagggcatgcacatgcggatacatttagttttgagttatatatcaatggacggcctgtcattgtcgataccggaacttccacgtacgaggtaaataattctcgtttttatgaaagaagtacagcggctcataatacggtggttatatccggacaaaattccagtcaggtttgggcgggacatcgtgtggctcgacgggcaagggttaaagtcctttgtgatgaagaagaacgtgttattgccgtgcatgatggctataaacgtttgggatgtttacatacccgcaaagtggaaaagatgaaagaacatctccggattgttgatgaaattgattgtgagggggtggcttatttacattttatgccgaaagaggatattgttttagatggagacaggctcatgggaccggattattgtatagagctcaaaggagcacgtgagattgaaccattcacgtctatgtacgctccggaatttaataaaagagaagaacgacgaagcttccgtatttcttttgacaggaggctagagactattatacaatgaaaattttattcttaactttttattttgaaccggatctttgtgccggatcatttcgtaatacaccgttatttcgagagttattacgccagatgaatgagaaagattggattcatgtgattacgacacagccaaatcgttatcagtcttttcatgtcgaggggcaagcgagggaaattgatgataattataggatagatcggatttatatcccagaacataagagtggctttgttgatcaagctcgttcttttcgggtgttttataaagaagcgttgcgattggcgggaaaagagcgttatgatttggtgtatgcttcttcttcaagattgtttactgcttttttaggtagaagaattgcgggaaaacagggtatccctttgtatttggatatacgagatattttcgttgatacgatcaaggatatattcaaggggaggaagatgatccggattccggccgggatttgttttgaatggattgaacggtatacattttcgggggcaaagcatattaatttagtttcggaaggatttaaaacgtatttcgaaaaatatagtaagcctgtttattcgtattttacgaatggaatagatgatatttttcttgatgtcccgaagtctaagcggcaagctgctgaagtgaaagttattacttatgccggaaatatcgggagtggacaaggattagaaaaggtaatcccaatggcagctaaaaaattaggagatcgctattttttcaggattatcggggatggtggaattaagacattgttgaaagatagaataaaagaattgggagttcataatgtggagttgttagatccggtgtcaagagaaaaattgataggatattataatgattctgattttctgtttttacatttgaatgatttggaggcatttaaaaaagtacttccgtcaaaattgtttgaatatgcagcatttgacaagcctattatagcgggtgttggtgggtatgctagtcagtttattcgagagaatttgagtaattatatattgtttgcaccaactgatattgagagtatggtggaacaaatattgaaatttgacagagggaatcaagaacagggtgattttgttaacaagtttgcccgaaaaaatataatgaaagagatggcacgttctattcttgagtgtcgttagttttattggtgtatatttatgaatattcttattacaggaatccacggtttcgtgggttctaatcttgtgttgtccttaaaagagcggcatgttctttatggtttggatattgttgccccggaaaaagagggggtaatgaggacgtattcgtgggaagaattggaggggatagagggaatagatgcgattgttcatttggcggggaaggcgcatgatacgaaaaatgaggcgttggcggagacgtattttacgataaatacgggattgacacagaaggtatttgattttttcatgaagtcttcggcgaagaagtttattttctttagttcggtgaaggcggcagcggattttgtggtgggggataagttgacggaggaggtaatcccgacaccgaaggggccttacggggagagtaagattgcggcggagaattacatccttgaacagttgaaagttgagaatggagaattgaaactgcaggagaagcaggtgtatattttgcggccttgcatgattcatgggccggggaataagggaaacttgaatttgctgtatagtgtggtgaagaaagggttaccgtggccgttgggagattttgagaataggaggtcgtttacttcagtggataatctttgttacgtggtgaatgggttgattgaaaaagaggtaccgtcagggatttatcacatggcggatgatgaggcgttgtcgacgaacgagttgatccgggagatgtgtgaggtgatggggaagaaggcgcatatttggcggatgaataaggggttgatgaaggagtgtgccgggttggggactttgttacgtttgccattgaatttggagcggttgaagaaattgacggagaattatgttgtctcgaatgagaagatcaagcgggcattgggtattgagcggatgccggtgacagccgtggaggggttgaggaagacgataaggtcgtttacgaattgtaaattttagattttaaattgggtgattttcgattagctgattgttgaattgcaggatcgttcaatctcgagatacttttatcttttagtttttaacttttagtttccatgttgtattattgggtggtttttgtggtgctactgggggtagagttgctctatttccgggtggcggactattttaatattattgataaaccgaacgagagaagttctcacacgaggattacgttgcggggaggggggattgtgttttacatgggggtgttggtttattttattgctagtgagtttagttttccgtggtttatgttggggttgacattgatagccggggtgagttttgtagatgatgtgcggtccgtgacgcagcgggtgaggctggtagtgcattttgtggcgatgctattgatgttttaccagtggggaatggtgtcattgccttggtggtacgtggtggtggctttggtcgtctgcacggggatcattaatgcttataatttcatggatggaattaacgggatcacggggggatatagtttggtggtgttgggaggattggcgtacgtgaatggatggggtgttccttttgttgacgagaagatgatttacacgatgatggtggcggtgttggtgtttgatgggtttaatttcaggcggaaagcgaagtgctttgccggggatgtgggagcggtgagcattgctttcgtgattttgtttttattggggcggttgattttggaaacgggagattggagttatattatatttttggcggtttacggggtggatagtgtactgacaatcatacatcggttgatgttacacgagaatatcgagttaccgcatcggaagcatatgtaccagttgatggcgaacgagttgaagattcctcacgtggtggtttctttggtgtatatgggggtgcaagccgtgatagtagcggtttatctggcaatgccggggatacattatgcctgtttgggaggaagtgttgccgtattggggatagggtacgtgttgtttatgagaaagtatttcaagttacacttggtcgtgaagtgatttgaaattttgtataaagaattgagcctcggaaattccggggcttttttgtttataaatacgatgaaattcgaggtgattccgaaaaagttgaagaatttttggaattgattccgaaaaagttgaagaatttttggaattgattccgaaaaagttgtatttttggagaaaatatagagcaattatgatcaaacggaagttacgggatattatagaaaagaggctttttgatggtaaggcgatattgttaatgggccctagacaggttgggaaaacaactttattgaaagagctttttgaaggtcgggaggatgttatgtggctaaatggcgatgagttggatgtacaggcgttgtttgaaggggtttcggcaactcgtttaaaggcaatgtttggtcgtaaaaaaataatcattattgatgaagctcaacgaattcctaatataggtttacgtttgaagttggtgacagaccaaataaaagatgtacaattgatcgctacaggaagttctgcatttgaattggcgaccaaaacgggagaacctttgaccgggagaaaatgggagtacaagatgtacccgctctcttttggcgagatggtagatgagcatggattactagatgagaaaagaatgatcccgcatcgtctgatctttggttattatccggaagtcgtgatgcgtccgggagaagaacgggagattttaagattattgtctgatagttatttgtataaagatgtattgatgtcggatcaaatcaacaagcctgatagtctggtcaaattgttacaggctcttgcctttcaggtaggtagccaagtttcttataatgaattggctcaattgtgtagcttggattcaaaaacggtggagaaatatgttattttattagaacagtcttatgttattttcaggttgaattcttttagtcgaaacttaagaaatgagctgaaaaccagtaagaaaatatacttctatgataacggtatcaggaatgctttaattgccaattttaatcaaattgagggacgagctgatcggggtgctttgtgggagaattttttaatatcagaaaggaaaaagtttttggagtataatcgtttgtggggcaattcatggttttggcgaacaaaagaacaaaaagaaattgatttggttgaggaacgagatggaaaaataacaggatatgaatttaaatggaatcctgatcagaaagtgaaaattcctcgtttgtttttagattcatacgaaaatagcgacttccaagtgatacatcggaataattgtgattcgtttttgctcgaatattgagggggaatgacacggatgtgtgttgcacaaggttgtgcaattaggtggaaaaagttacttttggcttgaaaaaacaaatgtggtaagtatgatacaagaatatcaagttagcggttttcgggtgagggaatacgaggagttggagtccacgaacacggaagcagaacgtgtggggtggagcgagttggaagataagatggtgattttgacgtataggcagacacaaggtcggggacaagtggggaatcattgggagagcgagccggggaagaatatatccatgacggtggtgtttaagccgcgggagttactggcggggcaacagtttgccgtgtcgatggtgattgctttgggggcttgtgattttatttcccgttacgtgagcgggtgttccgtgaagtggccgaatgatatttacgtgggggatcggaagatttccgggatattgatcgaacattccatcatggggcgttacgtgggaggttctttgtgcggtatcggagtgaatattaatcaggaacgtttcttgtcggatgctccgaatccggtttccttgtttcagttgatcggggaggaaattcccgtgaagcgtgcgttggaggagttgctggattgtattggaaagcgatatgaaacaatacgggattacgaggggatggaacgtgattttttgaaggtgttgtaccgtcgggagggagtgtatgattgggaagatgaacggggaatgttccgggcatcgattcggggggtaaacgagttcggacagctggtgttggaggacgtggaggggaatgagcgggtatatggctttaaggaaatctcctataaattttagatttatgatttacgatttatgattttaaattttagattttagattttaaattgcggagttttgattatttttgtgcaaaacatggataacttatggtag

SEQ ID NO: 229 - DNA, 6975 bp, Butyricimonas faecihominis
ggattattatttgcgggctggtgttggtgatgggatgtcagcgtaatgtgtaccggttctcggaaggtagcgtgtatggtacagtttaccacgtgtcgtaccagagtgaaatggattatgcggtggagatccggcaggagatggagcgggtaaatcggtccttgtcaatgtttaacaagaattcggtgattgcccagtggaaccggggtgagagtgaacaggtagattcgcttttcgttgctatgtacgagaaggctagagaggtgaacgaggtgacgggtggagcctttgacgtgacagtggccccgttggtgaacgcttggggattcggttttaaaaacgagaagttgccttcggacgagaagatcgattctttgttgcaatacgtgggaatggataaggtgcagttggaaggggagcggttagtgaagctagtcgagggggtacagatggatgccagttccattgccaaagggttgggagtggatctcgtggccgagttttttgaccgtaaaggagtacaaaattacatgatagagatcggcggtgaaatccgcgtgaaaggggaaagtaataaacggcgcccgtggcatatcggtgtagacaagccgattgacgatgcgacggctgcaaacagggagttgcagcttgtgctggctttgcgggaaggggcgttggcgacttccggaaattatcgtcgtttttacgtggtggatggaaaaaaatattctcacacaataaaccctaggaccggttatcctgtccaacaagatatactaggtgcttccgtgtacgctccgacttgtatggaggcagatgcttacgcgacagcgtttatggtgttgggaactgaagaatctaaaaaaatagtgttggataatcctcatatcgaggcttgttttatttatcaaaataaacagggagaacgtgaggtttggatgtctgaccgattgaaaacgttagtgttagaggagtaattttattggaaaagaagcgtgtgattattcgttgtatgatatggatgctggcatgggtattactcgtggaaagtcaagcaaatgcaaggcccttatcattcgacgtgcgtgggaataacgagtatgaatttataaagctacctgatacactgaaacaaaatgacgtggttttcttaccggatagtttaattcgggatacactccagtatgagttttccaagatcaaggaggtcgcttatcgacggaagtggacgaaagagttgtacaagatgatcttcgtgaatccccgaaaaattaacattgatattgttcaaacggaaaatagtgaggatcgttacaagccctaccggggaaagacgatccgtgatattcacgtgaaggttttacctcctttcggaacgagtgttaacgacacgacgcccttgcaggacagtttacaatggcttttaagcgtggcaaattccgttcaccagaaatcggccgaacgggtgataaaaaagcaattgaccgtgaggccggggatgatagtcgaccctttcgagctggtacagaatgaacagttactgaaagcaatgtcgaacgtggatgatgcgctgattggcatacaagaggtacagagtgacacgaatcaagttgatctgatgattatttgcaaggatgaattttcatggacgggggaggtgtggagtaacttcttgaatgcggttgacttggggctagaaacaaaaaacttgtttaaactggggcatagtttacactatcaggctagttttcggggaagtaaagataaaaaatggggaaacctgatcgagtataaggccagtaatcttctagggtctcacatggacttttacgggatgtacgagaattcctataatcaggatattttacgggtggaactggataaagagttcttgacgtacaagacaaaatgggccggaggtgccgcatacagtcgggtatattcctcgaaaacattggttgaccgggatattaacaagcccgtggaattgtttaattaccggttgtgggacttctggggaggaacttctttttatttgccggaaaagtatagttataaccggatattttacctgacgggacgttacacgggtactagttttgtcgatcgtccggaagtgtcgagtgattccaatcatttctattacgaccgtgaccggatcatgggagctttgacgtttaccaaaatcaagtatttcaaggcaaacttgatctatgatttcgggcgaacagaggatattccatcgggattatcggggacgttgcttttcgggtatgagaagagtgatttcacggagtacgggtacttgggaacagaatggcattattcatggtttaataaatacacggagaggtactatgcttggtacgcggctttgggtacttttctgaatggttacacggccgagagtggcgtgtttaaggtcggtagtcagtatatcagtcgtttgtacgatctgtcccggcaccggttacgtttttatagtaacgtggattacgtgttgggaatcaagaggaatccggatgactatatttatttcgaggatgctaatatccggggatttgattccgataccactcgtgggacacaacgactttccgcctccatgtccgcaacgttgttcctgccttacattaaaagagggtttcgggcatcggttaccgggtttgtggattggggggtgttggcccgggatgagaagaatttgttgaatagtcaatcgtactggggaatcggtgttagtctgaatctacgaaatgataacttgattctcaagaatgtaagtattcgttttgctttttaccccaaaggaccacccgatattcatagtatagaggtgaacgtgtcgagtcgtcggaaaagtggattttatgattaccgtgtttataaacccgatgcgattaaatacgagtagatcaaggtttttgatatacattttttaactagattcattttaaataacgatcgaaaatcgcctgaaaatccctatctttgtggcaaattaattttgatggggatgaagaaagtttttttattttctattttcttactttgtggcttatttttttctcaaatacttccttcggcgttagggagtgcgtatggaactctagcatcaataagcaaatggctgatgtttatttgtcttgcttttatcatgattaatgtagggagggaattcgagctggataaggtaaaatggcgttcgtacacgacggattattttattgccatggcgacggctgccgtaccttggctcttgatagcctgttattatatcttttttctggatacgggattgtcgtgggagaataatttgctgatcagccggtttgcggctcctacgtccgcagggattcttttcacgatgctcgccgctgccgggctgaaaaaggagtggatttacaagaagacgcaggtgcttgctatattcgatgacttggacacgattttgttgatgattccgttgcagatattgatgatcggtttcaagtggcaactgtttgttattattctggtggtttgtatccttttgattttcggatggaaacggttgagttcgctgaacttgccgcaatcttggagagctattctgctctattccgtatgtatcgtggcggcattcgaaagcgtgtacctgatctcgaaagcttttatgggacaagatggagcaattcatattgaagtcctgttaccggcattcgtgttgggaatggtgatgaaaaccgtgcataatcattcgcaagaggaagaaagagcctctagttttatctcgtacctgtttatgtttttggtcgggttgagtacgcctatctttatcggtttggagactgggggagacgggatgcccggatgggggatgctgatcttccatgtaattgtggtaacgattctttcgaatcttgggaagatgtttccgctattcttctatcgtgaccggaagattcaggagcgtttggcgctttcgatcggtatgttcacgaggggagaagtcggtgctggaattatcgtgattgccatggggtaccagttaggaggtcctgcgttgattatctccattttaagtttagtacttaatctcgttttaacaggtttcttcgtggtcgctgtgaaacgtatatcccagagtgtgtacggggtaaaagaataaagggtttatgatcttctgaatttatttacgagtgcatagattctccaccagaggtaagcgatgattaacacggatagggaatagataatccaatcgtccattttaaggaatcgtttgaacataagtggaacagcctgaatagtattccacgggttcagcccgtgccatgagtaacgtatttcagctggggctgcaatcatggatatgatactgaaagcaatagccagtataataagggcaaggagcagggatgtcttgtttattgttttcatggtgaattattttttatcttttttcttgaacaggtccccgattttccggaagaaaccttttttcttgggagtatcggtatctttttctgtatcttgtttctttactttttccagtttttggttggttaatctttccaacaggtttatattatccttgaacgtggggacttccagttctttttgtgtatccgtgggtgggaccgggaaggacagaccggaccaataggcgtaagtgttactttgcagacattcctgcatgaacaacccgaagatgggaagtgccatgttggcaccttgtcctagtgcggttgagttgaaatgtacacgagaattgttggccccgactcttacgcccactacgatacgaggattataaccaataaaccagccatcggcttgattctgggttgtcccggtttttccggctaggggtatgttcaacccgtagttgttgatcagtcttttccctgttccttcttgaataacagcggaaagcatggaagacatggtatgagcctgctctgccgggatcacccgttccctgcgtggtggttcggactcgtaaagaatgcgtccgtcccggtcttttatggaaagcagataatagggcgttgtcgatacgccattgtttgcatagcacaagtaggggagaatcatttcccgaagaggaatattggcagctcctagggcaatggagggaactgcaggcaggtcactttgtattcctagccgatgagcgtgttctatcgtggcgtcgattcctgtttgtaggagaacttggacggcaatcgtgttgatggattgacttagagcccctttcagcgtgtagtaaccaccgtactggttgtttgaatttcggggcgtccagttgtcgtactccgggtaacttttttgttcattattataataggcgtctacacgggctccatgttcaatggcagcactgtaaacgaccggtttgaacacggaaccgacttggcggggagccagcacttggtcatattggaaatatttgaaatcaagtcccccgatccatacttttatttttccggattggggttctactgctatcataccgggttgaagaatctttagatagtgtttaatggaatcaatggaagacatttgcatttcggtttctccttggtatgtactataaatagtcatgggctttttctcgttcatggctgcgaggatggctttctcgccaagcccttggcgttttagatttttatatacctcgctttcccgaatggcattatcaaggagattcttctctttgtcccatggctcttgttttcccagatgcgtgtagaaagcgtgttgcaatgacttcatgtgttgttgcatggctttttccgcgtaacgttgcatctccgcatcgatcgtggtgacgagtttcagcccgtccttgtataaatcgtaattggtgctgtttgcctcgttaaattccgcgatgagcttgactgcgtcttggcggatttgttcacgtaagtagggagctaggccggaataatggtttaacggtttgaaacggagacgtagtttttcttttttcaattcttctccttcttcttcggtcagataatcgtacttaaccatttgggcaatcaccgtgttacgtcgttgtaacgtgcgatcgggatgtactcggggattgtagtaagaaggccccttcaagagtccgatcagcgtggcggcttccggaacagagagacgtgttgccgtcgtggaaaaatacttttgggcggcactttcaataccgaacgtgccttcaccaaaagatacggtatttaaatatagggtgagaatttcgtctttcgtgtatagtttttcaagacgatgtgccgtgatgatttctttgatcttgatcaccggaatcatgaaacggttgttatactggcgaggatagagatttttggccaattgctgactgatcgtacttcccccgcccgaactcttatcgcctaatagtaatgtcttgaacaataccctcagcatactgactttatcgaatccgtgatgctcgtagaagcgcacgtcttcagtggcgatcaaggcgtttatggcattgcgggatatactgccgaacatgacgtttgtacggttttccacgtaatattttccgagtaactccccgtcttcactgtacagggaagatgcctcgttgttacgaatttccctcaggtcccggtaatccggaattttcccccacatcccgtagtacacgcaacatacgaatagtccaacgagaatggcgcccagtaaggcactcaatagtattgttttgaaaacacgggcaaagatactttgttttttcttcgtggctttttttcgtgttgtggtctttttcttgttcatataattgattccggaaatgcctgcgaatgtacgaaattgcaatgtaattttcaaggataggggtaaagttgtgtgagtgttttcgtttgtttgtatccaatattgtcgaatttcggacaaatttgatggtgtatttaatttattttatatatttgtaactgcaaggtgataattacattcataatgtaaaaa

SEQ ID NO: 230 - DNA, 6952 bp, Butyricimonas faecihominis
aaatgcaacatacccgatctaccatttcttgtgttgtaagattgaaagaattgataaatattcaatacaagtagtatggataaagcgaagtttgatgttgcgattttggtggggaagtatcttgccaacaatttgacggatgaagaacaaaagtatctgtccgattggctttcttcgtcagaaaagaatcgtgcatggtttgaacgggtaacatcggagtcttatcagattgaaaaagggaaagcaactcgttccattaacgtggaggaggggtggaaagctttggaacttaaacgggaatcccggctggggggacgtcgccgtcggatctattggatgcgttacgtggcgatgtttgtcttacctctggctattgccgttttattacaccaagtgtattattcccgtaaagataaggtggaaatggtacagacaattacttcgggaacgagtaaggcaattcttatattggcagacggtttacccgtggtgctggaacaacaacaggaaaaaacgctgaaggaatcggatggaaccaagattaacgttctgaaagaacatatcagttacgagagtgatgttgatgataagcaagagaagtcggtataccatgagctggttattcctcgcgggggagagttttctttgactttgtctgacgggacggaggtctacatgaatgcagattcaaaattgcgtttcccgacaaagttcgggaagggggaacgggtggtagagttggaaggggaggcctattttcaggttgttcataacgaggatgctccttttatcgtgaagacttcccggatggcgataaaagttttgggaacggagtttaatgtttccgcttatgcggaggattctattatacgcacgacgttggttcggggttccgtgaagatttcttcggaagtcagcggggaaagcgtggttcttcatcccggggaacagtcggctctcaaccggggagatcattccatgctggtgagcgaggtggatgtgtcgtatgcgatggcttggaaagaagggcgtttacgttttaaggagaaacctttgaaagaggtgatgaaaattatatcccgttggtatgatgttgacgtggtgtacgaggacgaggaggtgaaagattatcctttcgggtgtaattttagtcgccatgcaacgatagaacctttattgaaagtattcgaggcgacgggtacaattgaaacgagtattcacggtagaaaaatatggattagaaagagaaaataaaacggaagatggtggtacatctcccgcttgaacaagtactttgtggtaaaagtactataaagttaaataaataaacactcaaagttatgaaaaaaaatcatggattcccctataaatggggaataaaaatgaggtatgtgttgcttgtattacaagtggccctatttcttccccaatggggacacgcgagcaataatgttttattgccgggacctaagattagcttttcgatgaaagatgctttgatgaaagatgtcatctgggaacttgaaaaacgatccgggtttgtattcgcttacaacgcgaatgatttgttgaaggcgggaaaagtgaacgtggaggtgaaggacaaggatgtctatgaggcgttggatatttgcttgaaaggaacgggcttgacgtatgtcgtgcaacaagatgttatcgtgatcaagcgggcagatgctccggtgcaggaagtgaaaaaggtcacgattacgggacgggttgtagataaggatagtctgccgttgccgggggtaacgattttattaaaacacacgacaatgggtgtggttaccgaccagaacggacgttatagcatcacgatcccggatgtacaggagcccgtgttgatttttactttcgtgggaatgaaatcccgggaggtgaagtatacgggaaataacgtgattaatatcgtgttggaagatgatgtgacggaggtggaagaggtcgtggtaacaggaatgtttacccgcaaggccagtagtttcacgggatcggcaacgacgattaagggggatgaattgttgaaggtggggaatcagaatgtattccagagtttgaaagccttggagccgggattgatgatttttgaaagtatagacttcggttccgatcccaataaagtaccggagatgcaattgcggggaacttcagtgattgcgatggatgtggaaggagcttcggaccttcggggaaattttgagaataatcccaatatgcctttgtttattttagacggttttgaagcagcggcagtaaagatttttgatttggatattaaccggatcgagtccatcaccatattgaaagatgctgccgcaaaagctatttatggatctaaagcggccaatggcgtggtggttgtcgaaacaaaaagatcggtttcaaagaacttgagagtgacttatatggggaatgtaaatgtcgaggcacctgatttgtcttcttatgatttgtgtaatgctcgtgaaaagttagaagccgaacgcatatatgggatgtatactcctagtaggacggatgaaattgatggggtgcttcgtctggaacgtttgtatatggagcgtttggctaaagtggaggcgggtgtcaatacggattggatggctaaacctttgagaaatggtgttgggcataaacattctttgatgatagaattgggggataaaaatatccagttggtggctaatctttcatataacagcattgcgggagttatgaaaggttcggatcgggaaaatgtagcaggttccgtttttgcttcataccgaaataaccgattccgtttccggaatgaattgtctgttaatataaatcgtagtagtgattctccttacggtgaattcagtgaatatacaagactgaatccatactggactccggtggatcaatacggccaaattacaagaaatgccggagacgaggaggcatattatcctaatcctttgtacaatgcgacactgaatacaagtctgaaagataaatatacggatatcaccgataatttcgagggtgaatacgatgtttttgaaggcttgaaagtaagggcaaggattggttttactcggaaatttacccgtgcggatcatttctatccggcaaatcatttgaagttcaacaccgtgcaagaacttcggaagaggggctcctatcaaattaatacaggagaggggcagaccatggattacgatttcagtttgaactactcccgtcaattgggcgacaaacattatgtgtttggtttcttgagctatagtctgagcgaaaatacttttgaggaagatattttcaaggctgaaggttttcccagtgataagatgaacagtatattttttgcacgtcagtacacggaaaattctaaaccaacgggttctgaatctacaagtcgttccgttggggtaaatgcggtattcaactattcttttgatgatcggcttttaatggatgtgacgtatcggacgaatgcttccagtcaatttggagcaaaccagagatggggaaatttctggagtttcggtggtggatggaatattcacaatgagaaatggatgagagagctgggatggttttcgcgtttgaaactccgtgcttctcttggtagtaccggttctcaagggtctaatgcttaccagtcacttgctacttacaattatagcgataaatattatgaagatgctttgggtgcttatttattgggcatgaagaatgatgatttgaagtggcagaaaaaaatggattataacttgggggtggatatgacagtgaagaattgttttaatctggttttcgattattatcagagtattacggaaaatcttttggtcgctttaactttaccaccttcttctggtttcacgaccgtgcaggaaaatatagggaaagtaaaaaatgccggagtggaagtgaatatgagttataccgtattttcacacgcgaaagatcggtcttatctgacattagccttgcgaggtgctcataataagaataaagtactcaagatatccgattctatgaaggcttataacgagcggatggataaggagatgttggaaggtggaaagcctgttatcaaatattatgacggggtatctatgaatgcaatctgggctgtgccttctctagggattgatcctgccaccggaagggaaatttatcgaaagaaagatggaagatcgacttttacctacgatgtcaatgacatggttatctgtggggataatctccccaaactgaatggaagttttagtattaatttggggtataaaggactggggtttaatatgacctgcatatatgaattaggagctaaaatgttcaatcaaacgctgatagatcgggttgaaaatgtagatatgcattataatgtagatcggcgagtgttggaaggacgttggcagaatccgggagatgtggtgcgttttcgttctctgaaatcttattgggatcctgaaacccaaacttatcccagagatgtacagacgaaggctacttcacgttttgtgcagaaaaagaatgaattgaatatttcttctatcaacatttcctatgatttttatcgttatgcttttgtgaaacagatcgggttggaacggttaagtcttgctttttacatgaatgacgtggcaaagttgtcgacgataaagacggaaaggggattggcttatccctttgctcgaaattataatttttcattacaaatgacattttaaatactggaaatatgaataaaaagataaatacttgtcgtttgataatcggtttttgccttttatcgttcggtctgtcatcttgttccgagtggctggatgtaaaacccaaatccgagattaaagaagatgagttattcaagacggaacaaggatttaaagatgccatgacaggggtatatgtactcatgacggaggctcaattgtatggtcgggaaatgacttttgggttggtggaagcaattggacagcagtatgaaatggatcaggcaacgaatgattattatgatgcaactcagttccggtatgaggtggaaaaggtaacggctaaggttgatggaatatggagttctgcctataaagttgtggcgaatattaataatattcttgaaaatttggaaacgaacggagggtgcgtgacgcctccggtgtatgcgcaattgaaggcagaatgtctgggattgagagcttttattcattttgacttgttgaggttattcggatggggaaatttgaaagaacgtccggatatgttgaaccggctttgcattccttatgctttccaatatacgaaagagatcgttcctcaagtgactgttggaacggcattggaatatatggaaaaagatttgacggaggcggagaaattgatttctcatgatgttgcaacatctcgttttacctttaattattatgctctgttggcaactaggatgcgtattgccatgtggaaaggtgattattctgttgcccgaaaatatgcggaaaatttattgaattatgaaacagattttgcttgggtaagcagaaatgcattggaaacgagttatccggagaatcgggatttgactttttcaagtgaatatctttttggattaagtatcgagcagtataaagatattacggattcgaatttggaatttaaattagttgaaaatcaggataatccgcaaatgttttttcatacagccgaaattgcggctcaactttttgaagtagaggaaaatataggctccggtgattatcgttataaatggttatatgcacaaggaggagatcggtttgcttttttaaaactcaagcagtatgaaaagagtatttatggtaaccgggtcccgttgatgaagaaagctgaaatttactatacgttggccgaatgtttgaatgagtccggaaatgagtccgaacggcaggcgggagtcggttacttgaatacggtgagaagtaaacggaatataccccaagctttagatgttaatatatcaaaggatgaattgcgggaggaaattcagaaagaatggcggaaagagatgttgttggagggacaaatgttctattattataaacgtagaggaatttccagtatcccgcgttgcaacattacgatgaccgatcagacgtatgttttacctttacctcaggcagaattggaatttggaggccgagaaaacaataaataggaatgaatatgaaaagaatgaatagatatagtttatgttggttggttttgctccttgtcttgtttgaaggatgcgagaaagacgaaccgatgggatatatagggcgtcccgggttttattttaatggtaatgagttttcttattccttcgcggaaaatccttggaaaactgtagataccgtgatgttgcccgttattattaccggcaaacttgaaaattatgcccggactttaaaagccgaggtggttaaagattcttcaacagctacggaaaatatgtaccagttgctggaaggaactttgggagaaaatcagtcggaaggttttattcctgtcgtgttgaattatgttccttcgttggatgatataaccgtgactctaaaaatacaggccgtggcgaatgacgattttcaggaacttgatcttgtttttccctcttgccggttgaatttcacggctaagattatgaaaccttttaactggtctcaactgcaatattttttcggtacttattctactcgttggtggcggtttatcatggaaaagtgtgaacgtacttctttgcctttttgggatgatttatggtctccgattcctaatcctgatcctagcaaatataatatgtcttattacgagatgtccaatttgcaggagatgattcggcaggagttgagaaattacaataggaattctttgaccggaccgttgacacatgatgacggggatttggctgggcaacaagtcgtgatgccagctccttattaat

SEQ ID NO: 231 - DNA, 6882 bp, Butyricimonas faecihominis
gataaaaataagattgaacaaaagaaaccgggttcgaatcaaaagggcgtggaggaggatagtcctttacgtttgacggccgatctggaagggaactatctgctggatgagcggacgagcgagatgaagtggttggggattttttattctcccgccgggggaagtgttcaccgggttgctaagatgctgaagaagaagattggagcggataaggtggatatgttttgcgtgaatgatgttcaagcggatcggttgctggactacaagaatttgatactggtatgttcttctctaggacgtagcacttgggagagggaacagcgggatcgttgggccaagttcttcccgagtatgcgtaagatttccttgaaagatcgtttagtggctcttgtcggtttgggtgatcacgtgacctacccgaagaatttcgtggatggtatggggtacatggcggaattggtgactggacttggcggaactctcgtgggaaagacttcgacggacgggtacgtgtacgaggattccactgccgtgatcgatgatctgtttgtggggctacctttggatgaagattttgaatcggaaaaaacggatgctcgaataagcaaatggttggatatggtgttaccggaattcgaaaggatttgatcgtttgtggcgactgttaggtctgtattggaatttgggaaataaggatgtgataaaagttttttgttacatccttattttatttttaaggtataggcggtaatttgttgaaaaaagagttacttttgaggcaagcggtttcatggtttattggtctttaccgtgtaatcgtgcttatgtagaacgcaaaatgtattaaacatgatgagaagtattgtatgtatactactcttcttgatggggagtagtgtattcgcacaaaaggcggattttaaagcttgtgccaaattttccgagagaaatctttctgattatgtccacagtttatcggtttatccttcgtggatcgggaattctgattttttctggtattattacacgacgtgtgacggaacggtgtattatttggtggatgccaagaaggggaaaaagcaaaaattattttcgacggaacggcttgccgcaagattagcggaattgacaggtaaaactgaagatgttcgggattttaaattgggagggttccgttttgaaggggataatccttatcgactgatgttttccaagtatgggaaagattttgaatacgatgtgaaacgtgatgtcttgaaagaatattcacgggaaagaaaagagaatagttttagccgggttccttactggcaacgctggtcgccggatagtaattatatggtgtatgcttacaagcataacgtgtatatacaggaaaaaggagacacaacttcttaccagttaacaacggatggagaacgttattattcatattcttttcagcgggataaggatacggacaagaaggaaggggcatcaattacttggtcgggggattccaaggtgttctattgtctgcggcaggatcgtcggaacgtgggggaggggtatttgattgatcatctggcagagccccgtccgacgttgaaaacttataaatttccgatgccgggggaaaagtatgtttacacgtatgatttacatttgtttgatgcagagaagagatcgcatcaggtggttgatattgcgaaatatccggatcaggaggtgaaagtgatgctttttgattttaataagtacccggaatatatttattttacccgtaagagccggacgtgtgacgagatggatctttgccgggtagatacccgtacgggagaggtttttgaaattattcacgaacgttgtgaaccgcattttacagagcaattgtttgaatgtcgaattctgaatggaggggaggatattctttggtggtcggaacgttccggctggggacaatattatctttataacaaggacggacagttaaagaatcgggtgacaacaggggatttcgtggcagggagaattacggagatggacacgttgggacgtagtttcgtgtttgaggggtatggtcgggagaagggaataaatccggagtatcgtcttttctataaagtgaattttgatggttccgatttgacgttgttgactcccggagacgggtttcattcgattgatctggccaagaacggaaaatatttgattgataattattcccgggcggatcaggagccgattgccgaattaagagacacgaagggaaggaaaattatggaattggaacgtcctgatttgcgcttgttgtacgagatgggatggaggaaaccggagcgggtaaaggtgaaagcggctgatgggattacagatctttatggtgtgatgtaccagccgtttgatatggattcgacacggaagtacccgattatcataaacgtgtacccgggaccgcaagagaattttgttccacagtctttcacgttggatgataatggaaacgagtctttggctcagttgggttttatcgtgattaatgtcggttttcgggggagttgttttacccggggacggaattaccattgtttcgggtatggaaatttgagggactacgctttggcggattgtaagttcgtgatcgaacagttggctaaccgatattcttttattgatttggaccgggtgggtatttacggacattccggaggtggttttatggctgcagcctctattctgacgtatccggatttctataaagttgcggttgctgcatccggtaatcatgataataatatatatacgaaatggtggggtgaaacttatcatggcgtgaaaatgcatgagaagaaagtggggaaacaggatagcgtgatgtattcgtttgaatccaaaattcctacgacgatcgaattggctaaaaacttgaaaggaaagttactgttaataacgggggatatggatattaacgtgcatatggctcatacgattcgtttggccaatgctctgatgcaagcgaataaacgctttgatttgatgcttattcccggggcggaccacggcttgggttctccttattatgtgaatcttatccggtattattttattgaaaatcttttgggtcagagactagataatgtcgatatgagtagcattgattgataatgattaaacgatccttttttgatcttttacattttcaaggaagatgttaaagtgtgataggtgaaaaaaaatcaagtacctgataattaggttaagctaaaaaatgttatctttgaattactaataattttttgtcgaaaataattatcaaaaaaggatcgtttaatgacagaggaacgaggtgagtatattcgatttttgaatggggaagtgcttgtttttaagcacttttttaaagagcatttccccaaattttttgcctttacttctcgttttattgatgattcgtatgtacgggaagatattgtgcaggaaactttcattattgtttggtcccgacatttaaaagtgtttgattcagaaatggcattgcaggcttttatttatcgaactcttcgaaacaagtgtctggattatattcgtcatgaaaaaatcaaagaacgttattcaagtgagtattcgaaggaacgggagacaagtgattatttgatgcaggcaatcatagatgaagagagtcgtttcttgattcataaagcgatcaaatcgttaactcctcaagtgcaggccgtgataaaattacatttagagggcaagaagaataaagagattgcggaggaaatggggataagtgaaacaactgtgaaatttcataaatcggttgcttatagggagttgaataaatcattggggcatttatttttaatgattaccatgttgtcatagtttttttgaaaaaaataaaaatttcacctatactgttttttctctcgatcgttattggggaaacgagagttagatgaaagagataagtcagtatttattcatagctaaattaatctgtaaagaacggattaccgggttggatgatttggagagaagacagttggatttatggaggaatgaatctaaggagggagaacgtgtctttttaaacctgcaaaaaatttccacggaagagttagaaaaacggtatgacggggtggatgttgatatgaaatgggaagatttcaagaaacggcaacaacagggaaggagaaatataagagtgggagtgactgttgcggcgagtatttgtttgttgataacaagtgggttgtggttatggttgggaggtgcaagagaggaacgtgttgttttggcagaacagggacggaaaaataatgtttgtcttgtattgtcaaccggagaagtggtggatatttcgaacgtagagcaagatgaggtaaaattggataaagggacaaaactttattccgggaatcgtttggagtatgttcgaccggattctttgcataagaaggagttggagtttaaccagttgattattccgaaagggacattttaccatttagttctttcggatgggacgaaagtgtggctgaatgcggattcaaaaataaaatacccggtgtctttcggtaaagataaaagagaggtcagtttgcatggcgagggatacttcgaggttgccaaagacagtacccgtccttttatcgtgagtacggataagatggatgtgaaggttctggggacaacttttgacgtgaacacgtacgaggatgaaggaaaaagttttgtcgttttggtagagggactcgtggaagtgtcggcgggaaaaggggaatcccggataattaccccggggcatatggcagaagtgaatatgtatgacgtgcaggctaagattcaagttttaaagtgtgacacggaacattatgttgcttggaagaacggtaatttcagttttaggaatgcctcgttaacggaaattttgaaacgggtgtcccggtattatgatgtaaccgttattcgggaacaagtgtttgaggaagagtactataccggagatgtgtcaagcgacgtctcgttagagtctttgcttgccgttattgaatcctcaacttctgtatcatttaaagtagaacgcaaaatcgtctatgtacaaaagaaaagagattaggctaattggtctttcctaatctctttaacgcaaaatgttatatagacataacacacaaatataggtaaaaatgatggtagaaaagttttttttcaggaaattcaacaagtgttgtgcatttttgatgctactgttattcgcatcgggcacactttgggcaggacattcaccggaaaagataaccttgaaggtgacaaacgagaaactggttaaagtgcttgaagagatcaaaaagcaatccgggtataattttgtatacaacgagaaattcgtgaaggatcttggaggaataacagttgatgtcaaggaagtttctttggatagcgtgatgaaagaggtgttgaagggtacagggttacgttatcgaatccaagatcggattattttgttggagaaggctccgcaagaatcatccgaacaaaagtttaaggtgattaggggaagtgtaaaagacgaggacggggcgccgttacccggtgttacggtaatgattaaaggaaccactatgggagtctcgacggatgctaccgggaattttgttttggatatgccggatgggtatcaggttttacagttttcttttatcgggatggagacgcaggatgtcaagttgggagccacggagacacacgtgaatgtggtgttgaagatggctgtggggcagttggatgaggttatcgtttccacggggtacacgcagacgactcaaaaacgaaccacgggttccgtggccgtggtgggcagagaggtgtttgaaaataaggtccccacgtcgatagatcaattgttgcaaggacaggtggccggagtgagtatcgtggccaaatccggtcgtccgggtgaatcagcaaagattcggattcggggaacgaatacgcttaccggggacgcagaacctttgtgggttgttgatggggtacctttgcaacgtaatataccgagtattgaaaaaggacgaattaaagcgggtgattttaatgatatttttgctaacggtattgccgggattaatccgaatgatattgagaatattaccatattgaaggatgcttctgctgccgcaatctatggttcaagagctgcaggtggggttatcgttatcacaacgaagcgaggtaagattgggaaaatggctgtgaattattcggctaatttttcgatggtaatgaaaccgcaaagggatggtgatttgatgaactcaaaacaaaaattggcttgggagcaagagctgtgggatgaattctcggcggatggatttacgaacggaacgtattatccagtggttggtattgtcgggatgttacgagccaataagttggggaaagatggtaaggtctggacagacgaggggtttgaaccgatgagtgctgcggagcaagatgcttatatcgcagatttatctaaaactacgaccaattggtttgacgagttgtttcggactgctttttcgatgaatcattatttgtctttgtccgggggaactgatattgcaacatattatgtttcttttggttattcgaaggataatggaattttaagaaagacttcatacgatcggtatagtttatctacaaaggtaaaattgaatcctcacgagcgagtttcgatagatttgggtgttgatttttctcaacaaaaatcggatgggtcttcgttaaacgtgaatcctttccaatatgcttattttgccaatccttacgagaagccgtataatgaagacggctcctacagaccggattatacttattataatttgaatcaaattaatggtggaagag

SEQ ID NO: 232 - DNA, 6823 bp, Butyricimonas faecihominis
tatatatcatcacggtaatggcgttgttcgctgccggatgttatgaagataaaggaaattatgactatgagaccgtgccgctggtttccgtgagcggtatagagaaaagttatgatttttacgtggggtcacaggaaacgattaccccaaccgtgacctggacaaatggcaagccggataaggtttcttatgcttggagaataaacaataaggtggtttgcgaggaagaaagtctgaattttgttgtgggtgaccttcccgtgaaagctggattgtatgccgagtttacgattacgaatgaggatttaggggtagagtatatcaaccgttttaacgtgtcggtttattccacatattattccggatggatgctcttggcggataaaggtaacgtttccgagttgtcctatgttcgggatgatgggggcctttatgcggatatttataaaaacgtgaacgggacggatttggccgggggtgcttgtgccttgatggaacattggttgccgacatcagaagagatcggacagattttcgtggcttgtcagaacggaccggaatattctgtggaattggatggaaacacgtttagtaaaatggtcgccacgaaagatgagttcgtgggggatgtacccaaggatttcaagcctatgagaatgaattgcgtgacgaattacgattatcttatcagtaatggtaaattgtatgtgcgtaatattcaagcatcatatgatgctctttatcaggatggtctgtttccaaatttcccttatccgggtgattatgaattaacgaatctgggcattcggggaaacctgctttttagtaatgatattatctgttttgataagaaaacttcaagttatatgctggtgcgaaccggggaaatgaaacgatttgattacacgaatgattcggaaaaggcatttattccttacgatatggggaaaacggtgctggatggaggaccgatctcgacagaaaccccgacggatgagttcctgacagttctgaaatcgaattcggaaaacaaggcatacgtgcaaaaattccgattctccggatggggagcgaagacgtatcggtcgatctcggaggtggagtttcctgatccttcaatcattaatgagaatacgaaatttgctgtttgccagaatcgtccttacgtgtatattgcatcaggtaacgtgctgtatgtttataatcacaaggataatacggtaaaaccattacgttctgattttgggcggacgattcgggatattgctgtttgtcccacgaattatgaacgtttgggtattgctttggagaatgcggatgacacgtcgaagagtgactttatggtactggatgtttcggtcgttggggatggaaaaactctggaaggaatggaatttatcggaaagttcggtcgtgtggtggatttaatttataagataggtaatcagtgggatacttattaataaatcagtattctcccgcttagcgggagaatactttaatgtataggtgatgaaagtatgtaaaaatgtatggctattggttagcttgctatgcctgttttgtgcatgtaaagaacgggagcatgatcgtttcacgatttctggggagatgaagggattacctaaaggtgtcgtgaagttgtacacgaatccgccgggaaatgttttattggatagttgcgaggttaaggatggaaagtactttttagaagggaagatcacggagcctcaggccggtctattgttttttgacatggaaccgcaataccagcgattgggggcctcgatggtggctatatttatagagccggaggatatgaaggtgtacagcgaattggatgaggtgaagaaaacgttgaagattacttcagccccgattaatgaagatattcacaggtataatgtttatttgaagtctttaccggagaaacaattggttgcagagtttaatggaaaaatccagatggcttttgccgaggctaggatggaagaagtacgagagatgagtcgaaagcgagattcgttgcaaatggtgattattgaccggttgtttgcttttgagccgggagtttctaaaagtccggcagcagcttatttggtggctcaattgtccgcatctctggatgttgtgcaaagagggaagatcgtggaaaagtttgacccgagtttaactgattcttattatctgaacggaatgcaagaaagcgtggagcgggaaacggctttacagccgggaaaagtcttcccagattttcaggtgtttgataaagatggtaggaagtacaccttggctgattttcggggaaaatatttatttgttgaatttagtgcatcctggtgtggctggtgtaaaaaagagatcccttttattcgtaaagcatatcacgctttaaaagataaaaatgttgtttttgtaacgatgatgatggatgatcggaaagaggcttggttacatgagatcaaagagtataatatcgaatggtattgtttgtctgatctgaaagggatgaaaaacagtcctttggctaaagcatataatttgggagggattccagactctttcgtggtagatccggaagggcgaatcgtgtgtcgggacttgaggggggatgaagtattggagacattatctaccttgtgtaattaatggaaaaaatcatgtataagatattaatcggtttgtttttatctgtattgtgcttgcaggcaaaatgtcagatacaatttgatgagggaagtttcacggaggttctgacaaaagcaaaacaggaaaaaaagatggtgtttatggattgctacacgagttggtgcggcccttgtaaaatgatggtgcaggatgtttttagccgggaagacgtgggacaatttatgaatacgcattttgtaaatgttaaattggatatggaaaaaggggaggggcgggaattggctaagaagtatcaagtgaaggtttacccgacttttttgatcttgaatgaagatggagaggtgattcataaaatggtgggaggaatgaaagcagaggaatttttacagaatgtgcaaaatggtattggagaacattctttgtattcttatgagaagagatatgccaacggggagcgtgatccgcaattcgtgtatagttatatagagactttggccagggcttttatgaaggaacggatggaagaggtgttacacgaatattggggaacattgacggatcaagagaaaagtggtaaagaaaattggatgctcgtgaaacgattcgtgaagaatccgtcgttaccagaatacaagtatcttctggaatataaaaaggattttgatgcggcggttagtaaagatagcgtggatcgtaaaatatatgatgatttgttcccgttgatcgtgaatgattgtaatgaaattatttttcatgataaagtaaatgcagctgaacttttagatacatataaaacgtgtgttactcaatcgggaattgccggacaggattatctgttggatattgtggagtttaccagagcctttttgtccggtgatttgaagaaagcattaaaaatgtatgataggaagttttcccgtttggatcatgatgctcgttttgatgtaaccttacagttgaatggaatgttgattcgtaagggggatgcaaaaatgtgtgagcgaggattggaattgattgagagaacaatgaaagattgcgggtggtcggaggataatcctttgtttgcagccgtggtttccggattgaaagataaatttaaagataataaagatgaatagattattgattttgttgacaggatgtttgttctgtttttcgtgcgcatccaaaacggatggttttaaggtaaaaatgcatttggaaaatgctccggagtgtgaaattttcgtgagtgaaagggttccgaatcctgcccagtggtatatagatactttgaagttgaaagatggccaagtggtttacacgggtaaggtggattaccctcgtttggtttctttcgttgttaagaagggagaagatgattttgtgggttctttcagtatatttttggataatagtgaggttgaagttcaaggggattttaataatttgaagagtctaacaattactgggagtaaaacacatgatgaatttgttaccatagaaaaaaacgggcaagagtttatgaaagagtatggcagaatcggttacgaccggagtaaggcgtttaaagataaccggactttatatgattctttagcagatccttacaagcaggcttatgataaggtggtggattacattctgaatcttccggggtatgcacgtagtgaggtggctccttattttgtttcggaatacattagtgctgataatcttcccttgatggaaaaagcgctgaatgctttcgatgtttctctagccgagaacgcatatatcgctaattgccgggtaaaattagaaaaggaaaaacgggtacaaccgggagtgatggcgtatgatttcacgttagaggatttggagggtaatacttacaaattgtcagattatagggggaaatatgtgttgctggagtttagtgcatcttggtgcggatggtgtaaattggagatacctttccttgaaacagtttataagaatacgcaagataagaattttgtaatgtttacgattaatctggatgacgagcgagggaaatgggaggaagatgtaaaacattataatttaccgtggaaggttatttcagatttaaaagcatttgaaagtcccgtggcgaagagttataacgtgagtggtattccgatgatttatctgatcgatccggagggaaaaataaaggagaaaggattacgtcgggaagagatgattgaatatataaatgctttgtttgagtaatttaataacagggggaaacgagatttgaaagttttcccctatgttattttaagggtgaaagaaattatagggttgtttacaagatggtatcggattttgtgatgattcaattatcgtgtatttgaatatttcggaggaatagttatttttgtagcactatgagtgctattattcagaccaataaagactttgaagtattcttccgggagaattttccatccgtgtacgctttcatgaaacgctacacgggggatgatgaattagcagcagatttagcacaagagacttttatccgggtttatgaacggcgggatgagattgtttctgttgattacgggaaagcttttttatacacggttgcacgtcatttgtactggaatcattgtaagcatcaacgggcgaaggaaaattatttcgcacaattggatgagagtaacgtggatgattacgatttcttgcaggaggttacccggcaggaaaccatgcgaatgttatatgttgctattgaccagttgccaccacagactcgtaacgtgatccttttgaatctggaagggaaaacgaaccctgaggttgcggaagaattaggtatttccgtgaacacggtgaagtgtttgaaaaagtcggcttacgagacattaagggaggccctatccaaaaattactttgtgattttgatgttcctgttaggggtgtaaatgttaaatcttttctttttttgaatttttttctagtctgacctacccacttttcatttgaagtaatctctatgataaaattacaaatgtaaaagtatggatttactaaaaaaacgtttggatattgcccggcttattgccgaagagttgaccggaacgattgatgaaaaggatcggctcgtgttggcccgttggttggatgaggacgaacgacaccggggggaatatgcgaatattttagaatcattaaaggctgggaacgaggcttggaaggatcaggagcgggggaggcagttaatggaatcccgatgggggacagtgaaatctcatacggttcggaagactgaccggtggattacgtggagtaagtatgtggcggttatcgtgttattcgtgagcattggaattttttggcttgtaaatgaagaaaagcaggaggtggagaatggtactgttgcccaaattgaacatggtagcatgaaagcgcagcttgtacttgctaatggaaaaaaggtggatttgaggccagaaataagcttacaattagaagaggaggggggaacccgaattttgacatcagataatagggtaaagtattcggggaaggattctttagccggacaatcgacagaagtaaagtataatacgttgatcgtgccgcgaggaggtgaattttcgttggaattggcagatggaactcgggtgtggttgaatgcggagtcgaggttgcgttatccggtggctttcacgggtaaggagagaaaagttgagatggagggagaggtttattttgaagtggcaaagaataaggaaaaaccttttattgtaaccgtgaatggggttgatattcgggtcttgggaacaagttttaatgtttcggcttatcaagaagaggtggtggccacgttggtcgaaggaaaggtgcagttgaaaaaaggtaatgaacaggttattttatcgcctaaccagcaagcaatatggtctgatgacgagtttagagtgaaacaggtagatgcccgtaattatgtgttatggaaagaggggattttttattttgaagatgttgatttggagacaattctggatgatatggcccgctggtataacgtgaatgttttttatatgaacccagcgttgaaagagatgaaattctctgtcgagattagacgttatggggatataaacgagatcctgagaagaatagaacaaactaaacgtgtaaaatttgaaataaaagatagaactataaacgtgtatga

SEQ ID NO: 233 - DNA, 6800 bp, Butyricimonas faecihominis
ttcctattctttattggatgatggtttcactgtccgggagtggtatcacgtattttccaccactcatgtcaatcgggtattccccgttgtacatatccctattcagtcgtttatacaagtaaaaagtctgcccttcagcaatggattcacgtgtggcatccatgtacattcgatccagaaattcatcctttgtcaaggaagtatttaattcggccgcacctctagctattttcaaggtattgagtaaattaattgcccgtggtaaatccgtctcggccaaatactcacacatgatgtaatatatctcgctcatacgcataacaggcaaaagaggatattgatactgtatattccataaagcactggcatccgttacaggaacccacttcaaggaatacccggtctcgtgaagcaaataacgatacctaaagtcagccaaatcccccgtaaacaaattcgttctgttcttaatcgggaattgtgaataagacgaataaaacgattggaaccagtcattataaacgtcaaatattttcgtgttataaaaagccaataaaatatcatcaaataacttacatcggcgatattgaacattcgtgttactgatattcccctcgggagtaaaacgataccaacctttttcactttggaaacgatacacttcttgagcatattgataagccatcgcccgatctcccttgtattgataagctctagctagcaaggccgtcgctgcaacataattcatacgagttccccggtatgcaaaaaaatcaccaccaagagccgtacctgttacattaccatcaaaacgcatactcgcactttccatcattttatagttatacaatgtatcgttataagccaatagccgttgtgcctgtttcaggtcactgataatactatccagcaccacggatgttggcagatgggtcgggtgtgaagtcaaatacaccgttacataaggaacataagccgcatcatctcccgttacaggagccggggcaaataacctcaatatatcgaaatgcatcaatgcccgaagccctttcgcctccccgataagaatatttttctcgttttcaccctcgtagaaaaagtcgttcccgtgtgcctctgtattctggataagcacgttacaattagcgatggtattatacgctttttcccaaatagcttgagtgatacttttgatattattatgctcataattataatttatagcattaccgagaaaataatattcagggtacaaagctagccaagaagggacttcataattctgaccgagcaaactaataaaaccaaacgaaaggtcctgcccgtaaagcgatgttccggacaagttccggtaaataccgtttagtgctgtcctgtaaccatcatagctggaaaataaatcttctttagcaatctcgttttccggttccacttgaaaccaatcggaacaagaagaaagggaaaagagtaacaaaccggacaataatatatttttatacgttttcataagcgaatgattttagaaactaacacttaaacccaaattaaaggtacgggcaaacgggtaatccaatcctcgttcctgcttaatagaggaaaatgtacccaaatcgttcgtactagcctgtattcgaaggacatccaacccgatacgtctcacccattcaggattgaattcataggataacgagatcgaattgatcgtgaactcgttattatcctgcacgaaacgggaggtcgactgggtggtcagcttccgattggcaatattctttaaaggtgtgacatcacccggcttttgccaacgttgcgtcaatacccgtttatccgcattggacgaagataaatcaacacattccactttacccaacaaggttgagttatattgttgccctccgaactcgtacatgcaactcgtgtacagggtcaaacgtttccaccgaatattgatcccgaacgatccttgccctttgggttctgtatttccgataatctgctgctgggatgataaccatttccccgtgacattccctgaacgatctacaaataattcctccccatccgcaggattaattcccaatgatttcatcccgtaaatagctgttaaggaaccaccttcttcatattttaggaacggttcggatttttcagccgaattcgcgtatgccgtatgttgtaacgttaaataatcatccacacgttcattatacgctttcaaagattcggatattttcatcaatctcccctcgttacgagcgaaattaatgaaagcatttactccaaaatccttcgtattaagaatggtagcacttaaactaatttcatatccccgattacgagtttcccccatattatccttgtaggaagtgaaaccggctgaagacggaatggtaacatctgtaatcatatccacggtctgacggttataccatgagaaagttaaactgtacttgctttggaaaaaactaagatcaaaaccgatattcgtcgtgttggttttctcccaaacgagcttttcgtttccaataccttgcagggtagccccgacacccgtggaataccagtcatcaaaaagaacctcgtaagtatcacgtgctgcataaggaggatagttcaccttaccggtagcaccataggttccgcgaattttaaattgattaagccacgggagagccttcatgaacttcaaattgtgaacattaataccaccaccaaccgaccagaaagacccccactgtgaatcggaaccaaactcggaagaaccatcaaaacgaatagacacatcccccagaataatattatcccaagagtagttcccggaaataaagattcccattaaacgggtcttgttatccgcaccggaaggtttactcacgatctccttggcgtgtcctatcgtgtgtaaagctgctgaaggaaatcctctgtattgagacgataaactactcgtttgattctcttgagcgtttatacccaaggacaaattcaaataattcttcccgatcgaattattataagccaaaaatgcgttcacgttccaactaaaattgtccgtactgctaacagacaaatccccacgagtaaaaggattatcttgagaactatactttgttgataaagggtccgtgaaattattgtcttctgtatcacttttcgtaacagagaattgactttgtaattggagatgatcgctgataaaccagtaaaaactcaggttattcgttaaattcgtggattctccacgactaaagttacctaaagttgcctcgtaaagaggattcggaataccggtagccaaggtttgtttcagtttcccgtcctcatcatgtatggcataataaggctgttgtttcgtgtagtcactaaacgagccatagggagaatctgatgatttggcaaggtcgtatgacacatggttccgaatctgtaacttgcccactcgataatcaacatataccccaacactcatacgattacgataagattttttcataactccccccctcatgactatagctcaagtctgctccgaaccgaaacccttccgttccccccgatacatacaaactatgagagtgattaaattgattttgcaaaggttgtgacatccaatcggtatcaacaccctgtgtaatatagtttttcttcatgacataagccgtcatatcattagccttggaaagatcgtacaaaccagacaatagttcggcctctaacttttctttcgcattcatcaagttataatcagaaagatcaggagccgtcagagaagcattgaacgtgtaagatacctgcaatttacccaattcaggggttaccgtttcgatcacaataacaccgtttgaagcacgggaaccgtacatggctgtcgctgcggcatctttcaaaatcgtgatattggcaatcctgttcggatccatatcgtatattttctggacattcacctcgtaaccatccagaataaaaacgggcaaattgggattagttgtcaatgaaaattctgaaacactccctccctgttgtgcttcaagaagatcaagctgtttcaccccatccattccggtacgcccacgaatatagaactccggtaacgcattcgggtttgaccccatctcgttattcttcacaacacgcaacgaaggatcaaaaacctgtaacacgtcaatcacgtttctcggagaaatcttcaaaatatcctcctttgtcaccgtcgtggctgcacctgtaaaactctctttccgaatattagcatatccggtcacaatcacctcgtctacgcccaccgtttccggctgcatcacaatccgcatcggtttcggggtcggtaatcccaacactttatgcacctgttttttcattcccagaaaagaaacctcgatataaatctcgtcgtccataggcacgactaaccggaacttaccgttcacatcggttgctactccggttgtcgttccctgtaacacgattgtggccccgataataggcatcgaatccctttccaagactgttccctcgatgaccacttcttgtattggctttctcgcttcttgacgctttaccacgataatctgttctccggaaacccgatacgtgtactccttaccttggaatacccgatccaacacgttttccaccgtctcgttcttcacgctgatcgtgatcttccccatctccttctcctgcgtgtcgttatagaagaacttgaaagaagtctgtttctttatctcctgaaacaactcggagagagaaacatctttcagctccaacgtcacccgttgtggctccaccggatcacctttcactgaaaagaataagaaacttgtcccaaaaattgtcaataaaacgactctacagagaaattttaatgacaaagacaacgaatacttgttttttttcataattttgtcatgttaagtttattaataagtaaggcttagcgcaaagagcatcgaatagtgttggtcgcacggatgctcttttttgttacctcttcagaataattcgatccttatccatcatgtaagtaatattcaaatttgtacacagtgactcgattgccatatgaatatcttcccggtcgaactccccgctaaaagattgggtaaatacaagtccggtctcgttcacgatcgacactccataccagcgttccagcttccagaccacatcccggaaagcctcgttatcaatcaccagtataccgtccttccacatcactttcctcgcggcatccacctcgttcaccttgatagtgccactcttcgtgttaaacgtgaattgttgattaggcttgataacaacaaaacgactgccaacaccgacgcgcacgcttccttccaccaacgtcgcgctcacctcatcccggtccccgtaggtgttcacctcaaaacgggttcccaacacttccgtggtcaactcccttgatgccaccacgaacgggcgggtcgaatccttggccacttcaaaatacacgtttccccgggcctcgacttcccgaatatttttaccaaaataagccgggtaacgcaaagcactttccgaattaatccataccttggttccatcagacagctgcactagaaaacgctcgcctgccggaacaataatttgattatagctcaattcttcttcttcgattcccatcgaatcttttagcctatacacgattccccgatgatccactttattaatactgacccactctcccgccacccccgacaggtttaacgaatcaccaagtatgatctctttgttatcagccaacttcaaaataacttcccgtcccgaagaaacgacatatttttcacccgaagaaacctccggaacatctttccgtaaccagaagacagaagacaggatcatcaataacactgccgcaaccgaacctatcctccacatcaacgtcacacgcattttcgatttcagagatttttccataaacagacggtaatctcttacccccgcctccagcatttccgggcttgcgtgacttcccgcggaaaaattccatattttcttgaacttctcaaaatacacccgattttcctgcccctccatccatttcgagaaatatcgtatttcttccgaacctgcccggttttccagtattcggaccagtaattcttctatattgatttttttatcgtccatcttctcgtgcttttatacactaaagacagccgagggaaactttacccccaatgagaaaatgaaaaaaataaaataatttgtaacaaccagtccagttcgtctcgtaacttactcaatgctattgacatatgacgttcaaccgttttttccgaaatattcagtttttcggcaatttcccggtttttcaacccttcaatcttactcaacacgaaaacttcccgacatttctcgggtaaagttgcgatggcctcttgaacagccagctctatatccgatttccacaaagcctcttccgcctcgggggattgtatcactgtagagaagtagaaatcagtcaattgttcctgctcgtacttttggatatttttctgatgagccaacgtattcaagctgccatgataaactgatttaaaaagataagctttaatagaaagagaaatattcaacgcatcccggttttcccatattttatagtacacctgttgcaccacgtcccgggccgcctccatatcattcagcaaacgatcggcataattcagcaacgcgtcgaagtacgtggtgtatatatctacaaatgcagagatttcaccacgcctcaataacgttaacatttccctatcttccgaataatccacaaccatgtacattca

SEQ ID NO: 234 - DNA, 6794 bp, Butyricimonas faecihominis
tattaattatatctattttatccgggaaagacaaaagcatggttacgcggatgtgattccgcctttgcacatgctgttcaccgggaatcgggggacggggaaaacgacggtggcccgaatgcttggggagatattcgagtcggccgggattctggaaagttctatggtgaccgtcaggagtaggggtgaaattatcggtgatggttccattcctccacaacagattgccatgtatattttcgaacaggcaagagggggtattcttttcttggaagatgctcacaccttgtttcaggataatgtaggggccgcggcattaggtgttattttcgggcaattgtcgcctaccgataatggagataccattgttatattgagtggtgacccggaagcgatggataaagctctggccggaaatccgagagtgaagtctcttttcccgtatcatttccatttttccgattacacgccggaagagttattggagatagcgattcagaaggtggcagagaagaattataccctgcatccgaaagcgaaagaggcatttaaaaacttggtatcccaagtatgtaacgagcatgataaattctttggaaatgctttatttgtcgagaagatggtggataaagccattcacaacctatctgctcgaaccatgaagatcaggaaggagcgggaacttactcgaaaggagattacgacattgatggccgtggatattccgacggcaacttccgagctacccaattcttataaagatactttcgacgagaaagagattgcctcggctttgaaggatctggatcacatggtgggacagacgaaactcaaaaaacagattcatgatttcgtggatttggctcgtcattataatcaacaagggacgaaactaaatacccgtgtatcattacaatggtgctttaccgggaactccggaatgggaaaaggaacagttgctcggattattgcccgtatttataaagctatggggattatagataaaagtgaggttacaagttttaaagtagaacgtttactcgggttgaccgaggaagatgttatacaaagtatcggtatggctctattacaatcgaaaggagggttatttttcttcgatgaagattccagtagtctgaatgaagtttccggtttccgggatcgggtaagggcgattcttgtgaatcagttggcaacacaaccgggggcttataacgtgatctatgcgaaacaagatcctccccgtcagattatcaacgacgaggttgaaaaggtttctgatatgattaatattcttgtttttgaggattatacggctgatcagttaatggaaatattgaaacgtgatcttgccacggataatgcccggatgacgagaatggctcaacaacacatggaacaatttatatcttatattgtcgcgaataaaaaacgtagtcatgccagtgcccggttaatcaaactggttgcagagatgatgattcggaatcgggtacagcgcttggcccagaataagaaagcgaatgacgtggatgtgaaacattcggtcacgaaacaggatgttgaaatgttcacgcctaccatgttggatagtatgacatcagaaaggaatacaatcgggtacaagcaatgaatcgcagaatacttcatcttgctattccttctatcgtgtctaatattaccgttcctttgttgggattggtggacgtaacgatcgtgggacatttaggggcgacagcctatatcggtgccatcgctgtgggaggattgttatttaatattctttactggaatttcggttttctacgaatgggaaccagtgggctgacttcacaagcatacggtcggaaagataaagatgctgaaatacgggtacttgtgcaggcggtgagtgtcggtttattttcagccttggccatgttgattctgcaatacccgatagaacggctggcttttcgactattggatacaagtgcggaggtggaacaatacgcggtctcttattttagaatttgtatttggggggccccggcggtgttggcacaatacggtttcacggggtggtttatcggaatgcaaaattcccgttacccgatgtatattgccattgtgatgaacgtgattaatatcgtgtgtagttcctgttttgtctttttgttcgggatgaaggtggaaggcgtggctttggggacagttgttgcgcaatattcaggagtgatgatggcttggtggctttggttttataattacaaagaactgcggggacggatcacgtttagaggaagtcttcaattgatagctatgcggcgtttttttgccgtgaaccgggatatatttcttcggacactttgcttgatcggagtgacaacattctttacttcaacaggagcccgtcaaggagatgtaattctggctgttaatacattgctcatgcagttgtttaccttgttttcctatatcatggacggttttgcatacgcgggggaagctctgtcggggcgttacgtgggagcctgtaatttggtacaattgaaacgggcggtgaaggcattgttcggctggggagttggtttatcattggttttcacgttattgtacgggataggaggagagaatttcttgggattgttaacgaatgacacggtcgtgatagagactgccgggcattatttttactgggtgcttgctattccgctagcgggatttgctgcctttctgtgggatggaattctgatcggggccacggctacccgttttatgttatgggccatgctggtggcttccggtagtttttttgtgatctattattgtttttccggggctacgaataaccatatgttatggttggctttcttggtttaccttgcgctacgcgggattatgcagactttatggagccgaaaggtgttcactttaaaatatctccaaagtctgagatcataaattgaagatcggataggtttatttgcccgctttttattatattcgcggtgcaaatacgtgtagttgaaaataaacaaataaaacacatggctatagtattctatcaaaaagatgcaacagtgtatgccgtacactataaagaatcggaaaatcctttagatgtaagtaagttagaatggttattcagtggggctaagaaagttcaaagcgattcactggaaagctttttcgtgggacctcgtcgggaaatgattaccccgtggagtactaatgccgtggagattactcagaatatgggtatttccggtatcttgcggatagaggaatttactcgtgtggaagatgaaaaagcggcttttgacccgatgcttcaagcattttacaagggtctgaatcaagatacgtttactattgataagaaaccggacccgatcgtgtatatcgaggatatccgggcatataaccaacaggagggattggcgctgaatgaagatgaaatctcttatctggaaggtctgagcaagaaattgaaccgtcggttgacagattccgaggtattcggtttttcacaagtgaattccgagcattgccgtcataagattttcggaggtacgtttattattgatggggaagaacaggaagagtctttgttctccatgatcaagaaaacttcccgaacgaacccgaaccggattgtttcggcctacaaagataactgcgctttcattgaaggaccggccacggtgcagtttgccccggcaacaccggacaaaccggatttctacacgcaaaaagatattaacacggttatttcattgaaagcggaaactcataacttcccgaccacggtagagccttttaacggggccgcaaccggttccggtggtgagatccgtgaccgtatagccgggggacaagcatcacttccgttggcaggcacggccgtttacatgacatcatatccgcgcttggaggcaggtcgtccttgggaatcggctattgatcctcggaaatggttataccagactccggaagatattctgatcaaggcttctaacggggcatctgattttggaaataaattcggacaaccccttatcgtgggttccgtgttcacgttcgagcatgaggaacacgaaaagacgtatggttacgataaggtaatcatgcaggcgggtggtatcggttttggtaataaagaacaagccatgaaaaagaccccggaagttggcgaacaggttgttctgctagggggtgataattatcgcatcggaatgggtggtggtgccgtttcttccgtggatacgggagtatatgccaacgctattgagttgaatgcggtgcaacgttccaatccggaaatgcaaagacgggtatgtaatgccatccggtctatggccgagagcgatgtaaacccgattgtttctattcacgaccacggggcaggaggacatttgaactgcttgtccgagctggtggaggaaacaggtggattgattcacttggagaaattgcctgtcggtgatcctacactttccgacaaagagatcgtgggaaatgaatcccaagaacggatgggcctcgtaatgaaagcaaaggacgtggagaccttgcggcgtgtggctgatcgggaacgggctccgatgtacgtgatcggggagaccacgggagatcatcgtttcgtgtttgaggacgccagaaccggagagaagcctattgatctggagatgacggatatgttcggaaatcccccgaaaacagtgatggaggataaaaccaaaagagaacatttcgccgatgttgaatatagtgaagataaagttgaagaatatatcgagcaagttttgcagcttgaggctgttgcttgtaaggattggttgacaagtaaagttgaccgttctattaccggtcgtgtggcccgtcagcaatgcgccggacctttacagttacctttgaatgacttgggtgccatggctctcgattatcgtggagaaagaggtattgccacttccatcggacacgctccggtagctgcgttggcaaatccggcttgcggttcgagattggctattgcagaggccttgaccaatttggtttgggctcctatcgaacagggaattaaaggtgtatcgttgtctgctaactggatgtggccttgtaaaaatgccggagaagatgcccgtttatataaagccgtacaagctgccagtgattttgctattgagttgggaatcaatatcccgacgggaaaagactctctttccatgacgcaaaagtatggcaaggataaggtgtacgccccgggaaccgtgattatttctaccgtgggtgaggttaccgatgtgaagaagattgtttctccggtactgaaaccggatcaagattctgaaatcgtgtatattgatttctcttttgataaattgcaattgggcggttccagttttgctcaagtgttgaaccgggtaggtaaagagaccccggatgtaaaggatgccgattatttcgtgaatgctttcatggcaatacagcgtttggttgaggaagggtatgttttagccggacacgatatttctgccggaggtatgatcacgaccttgttggaaatgtgttttgccgataatcgcttgggattggatattgatttttcttacctagctgaaaaggacatcgtgaagatcttgttcgcggagaatccgggtgtactagtacagattaaggattgcaagaaggttgccgctatcttggatgaagcgggagtggcttacaatttcttgggacgcttgggtaaggccggaaagttgaatatcaagaaagacggtaaaaacttccacttggatatttcgtcattaagagacttgtggtttaagacatcttatttgttagatcgtcgtcagagtggcaatgagttggcccttgaaagatataaaaactataagaatcatgatctgaaatacaagtttgcaccttcattcagtggtaagctttcccaatatggattggatgttaaccgtgttaaaccttcgggcataaaagctgccgttatccgggagaaaggatgtcagtgcgagcgggaaacggcatgggcgatgcacttggccggttttgacgtgaaggatgttcacatgacagaccttgtttctggaagagagactttggaagacgtgaactttatcgtgtttgttggtgggttctcgaactcggacgtgcttggttctgctaaaggatgggccggagctttcaaatataacgaaaaggctcgggtggctttggaaaacttctataaacgtgaagatactttgagtttgggtatttgtaacggttgccagttgatggttgagctagacttggtctacccggaacatggcgagaaggcgaagatgttgcataatgcatcccacaaactggaatccgcattcttgagcgtggatgtcgtggagagcaattccgtgttgttgaagtcattagtcggatctcgtttgggaatctgggtggctcacggagagggacaattccaattaccttacggacaggaagaatataatattccacttcgatacagccatgacacttacccggcgaatccgaatggatcaccttttgccacggcagctatttgtagtaaagacgggcgtcacttggcaatgatgcctcacttggaacgttctcttcacccgtggaactgggcatattatgccgaggatcggaaggaagatgaagtcagcccgtggattgaagcgtttgtaaatgctcgtttgtggattgaagagcataaataatataagtcttgcaaatcaaaataaaagagggcaaccccaaagccatttaaacaagactttggggttgccttcttt

SEQ ID NO: 235 - DNA, 6780 bp, Butyricimonas faecihominis
ttataatattaaccagcaaacaaaaacagaccgtgcgccttattttttacctgctcttagtaatattcctatattcctgccgggaagcaacctcccggctcgaacaaaccctgcaacttgccggagacaacaagctggaactccaaaaagtgctggaccactatgccagcgacagcctcaaactaaaagcggctattttccttatcgagaacatgccaggtcactattccctcgacggtccctaccttcggcaactccaacgcatcatcgacagcacggggaccccttacttgatgaagaaagtcatcctcatgcaacccctccgttatccctattcccgccagcaactcagggcggaaccggacctcgaacaagtgaaagccgactacctcattcaccaaattgaccaaaccttccggctatggaccaacagtccttggctcgaagacctcactcttgaaagtttccttgaatatttactaccttaccggattggtaacgaacccctcgactattggcgggattccatagattctcggctaagggaacgcctgcaagaggcaggacgctactttgataaccaaaaacactccccctataacatggcgcagatcgtttacggtcacgccctaggacttgattccggaaaggacaacctagcaggaatccccttctcggctaaagaatgtgtcttttctagccaactacaactactggcatatcgtatggtaggtattcccgcagccatagaccacgtcccctattgggccgacatgaacggattccacgaatggacggtcgtcatggatacccaaaacaaggacatactcgccggacagatagagatgaaaaacgccccgaaagtatatcgccgcacgtactcgaccaaccccattcccgttcccgaaaaggacgaatacattcccccgtttttcaccaaccccttcaaccgagatgtcaccgacaaatacctgcacacctcggatgttacggtttccgcaactgtccccgtgcaggcacgccacgcctatctcgccatattcaacgggcgggaactccgggtcgtcgactggagcgacgtgcaacaagacaaagcccgctttcacgccatgggtcccaacatcgtgtatttccccgtctatttcgagaaggaataccagcgaaacttcgcctatcccttcatcctgcgggcaaacgggacaactgtcacattacgtcccgacacgacacgacgacagactctcaccctcacccgtaaatatcctttacatcaccacaaagtgtaccacggcaacgcccttgttggggcaaggtttcaagcatcgaacgatccaacattccgaaaccccgtaaccatccacagtgtcacccacaacccgaacatgcaacccgaaatcgttccggtcgacaccacgcaaaaataccgttactggcgatttaaccataccaagattgtggaactcgccgagtggagattcaaggacaagcggggtctaaacctaacaggaaaaagcattgaccccgaaggtagaggagcccgcctcgccaacatcttcgacaacgacccgctttctcacgggagaatatcccaccagctcgtcgtggacttcgaccaccccgtcagcgtgtcggaaatcatctacctgccccgcaacgacgcaaacggcgtgtaccccggaaacgagtacgagctattatactttgacctcggtggttggcaatctctcggttgtaaaatcgccacgggctattccgttgaatttgaaaacgttccatcgaatgcggtttactggctgcgcaatcacacggctggcaaggaagagcgtgtattcacgatacaaaacggggaacaacgtttctggtaaaataaaatcatcatttttattcgtgtttcccttcttctttcaggaaaaatcgctaatttaggctattcattaaagaaagaggttatgttggatacaataaaacagttcctcaaggaacacgagattgacgagaaagcgggatttatcattgccgttagcgggggggccgattcaatcactttactccacgcattcaagtacttgaatctacgcatacacgccttgcattgcaacttcaacctgcgaggcaaagagtcgaacatggacgaacaattcgtaaaacggttctgtgaaacctacggtatccctatgagcgtaaaacactttgacacccaagaatacgccaagaaaaaaagtatcagcatagagatggccgcacgggaattgcgctacgactggttcgaagaaatgcgccaaaagaaaaaaatggactacattgtcgtgggacaccatgccgacgatctcgccgaaactctctttattaatatatgccgcggaaccggcatcaagggtctcaccggtatccgtcctgtcaaagagcgtattctgcgtccgctcctgtcccgttcccgggaagagatccttacttacatcgagcaaaaccaactggggtatcgcaccgactccaccaacaactcgctcgactacgtacggaacaaaattcgccacatgatcatccccgtgtgcaaggacatcaatccctcgttcctcaacacggtccgggagaactgtaacaccctcaaggaagtggagcaaatttaccgctacggtatagaccgcttgaaagaggaagtacttagtgaagaaaacggggaaacccttatcgacatacaaaaaacactggcggccccggccccttacacactcctattcgagatcctacggccctatggttttaacgccacgcaaatcgaggatattcttgaaagcagcgacgccatccccggcaaacaattcgaggcagaagaatacttacttacgaaaggtaggatctactggcggctgttcaatatcttagaaaaagaagacaaacgcactcttttggctgatagtggagaataccacgtcgatgacagcatcttccggctcgaagaacaagacatcgatgactcttttatcgttccccgtgaccttgacacagggtgttttgacctcgataaaatcacgtatcctctcgtattacgccactggtccatgggtgactggttctgtcccctcggtatgaaacgcagcaaaaagaaattaagtgactttttcactgacctcaaattcagtgccaagcagaaaaaagattgtcttattctacaatccggcaaggacattatttgggttgtcggccaccgcatagacgaccgatacaaggtttcgcctgccaccaaaagagttttaatcatcaaacaaataaaaggaatttaatacgcattaaatgatcaatgctctaaataaaaaaagaggcccgtcggcctctttttaacacactaacaataaatttactacacttataaaagcaaaaaacatttccttcaattgctgggcaaagataaatatttaaaacgtttgcgcaaacttttttaagaaaaaaaacgttcgcgtataactaatctaaaagttctttgtttttcatttttttatccatacttttgtgtgagtttacgacattaaacgagagagttaacatcattattaaccaaataataaaaaaacaaatgtcaaagattaaagttggtatcaacggattcggacgtatcggccgtctagtttttagagctgcaatgacaagagacgatattgaaatcgttggaataaatgaccttatcgatgtcgactacatggtttacatgttgaaatatgataccatgcacggtcgtttcaacggaaccgttgaggctaaagatggaaaactcgttgtaaacggacacgctatccgtgttacagcagagagaaacccggaagacttgaaatggaacgaggtgggtgcagaatatgtagttgaatcaaccggacttttcttaacgaaagaaaaagcagaagctcatttgaaagccggggcaaaaagagtcgtgatgtccgccccgtcaaaagatgataccccgatgttcgtgatgggtgtaaaccacaaaacctacgccggacaaactattgtttctaacgcatcatgtaccacaaattgtttggctccgctggcgaaagtaatgcatgataaattcggtattgttgaaggtttgatgaccaccgtacacgctaccaccgctacccaaaaaactgtagacggtccttctatgaaagactggagaggtggacgtgccgctgccggcaacatcatcccgtcatctaccggagctgctaaagctgtaggtaaagtaatcccggaactaaacggcaaattaaccggtatgtcattccgtgttccgacattggacgtatctgttgttgacctgacttgccgtctggaaaaagctgcaacttacgaagagattaaagctgccatgaaagaggcttctgaaaacgaactgaaaggtatcctcggttataccgaagaagacgttgtttcttctgacttcttgggtgatgcccgcacttctattttcgatgctaaagcaggtattgcgttaaactctaacttcgtgaaactcgtttcttggtatgacaacgagtggggatattccaacaaagttatcgagttaatcgctcacatggctacagtaaaataaaaaaaggggcatgagccccttttttagtctattacacacactaaccacatggaaaataatcaacaaaaacggccatacaagctaggtttggcattaagtggaggaggagccagaggattcgcccatctaggcgtttacaaggcaatgcaggagctgggaattaaaccggatatcatttcaggaaccagtgcgggagcgatagccgggcttatatttgcatccggtcactcggctgaggacgggcttaaattctttcaagacagaaaactgctcgacttcgcacgacctttagtctccaaaaccggaatcatgaccatgaccggaatggaaaaaaggttatccgagtttattcatgttgaaactttcgaggaactacaaataccgttggtggtcaccgccaccaacatgaacttgggcatacctacgcatttcagcacgggcaaagtagtcccctgcgtgttagcatcctgttctataccgatcgtgttcgtacccgttaccatcaatcaccaccagtactcggacggcggggtatttatgaacctacccgtgcgcccgatccgggagttatgcgagacggttatcggtgtacatatcgacccgctggagccctgtaatcacatcaaaagtatggtccacttagccgaacgctccttccacatgggtattctgtcaaacatgaacatcgatacccgcttgtgtgacatcgttatcgtgccgaaacacatcagccgatacagcatgttcgacctcaataacatcgaaaaaatagtggacgaaggttaccgacaggctaaaatcgtattctctcgcccaaaaatcatgaaaaaactgaatagcctaataattcagtgatcccatcgatgaaatctaaaatcactaaattaccatgttttcttcccttcaagcccttggaatatcctcgctgaacgagatgcaagaaacctcgctgaaagctcatcgggaaaccgatcacatcatcttgctctctcccaccggatcaggtaaaaccctagccttcctattacccttgctagaaaaccttgcttcggataacacgaaagcacaagctatcatcctaaccccatcgagagaactggccttgcagatagaacaagtattccgttccctgaaaagcggtttcaaggtagtatgctgttacgggggacatgacatcaacatggaaagtcgcagcctgacatacacgcccacactgatcatcgggacaccgggacgcattctcgatcacatcacccgggggacaattgacacgggctcgatctccaccatcattctcgatgagtttgataaggcactggaattcggttttcaagaagacatggaaaccatcttctcgtacttgccacacctgcaaaagcgtgtcttaacctctgcaacatcggccatcgagataccaaaattcacgggcctacgaaaccctctcatgctggattttcttgaaggtgccgcaccgatcaagttaacactcaaaagcgtgtacaccgaaggtaacaacaaactcgacacgctctacaaactactatgtgatctagaggaaggtcctaccctgattttttgtaactatcgggaacgggcggaagaagtgagtaattacctgtgggataaaggagtcaataacgagtatttccacgggggaatggaacaggaagaacgcgaacgagtgctgtgtaaattccgcaatggaagtacttacattttcatctcgacggacctcgcctcccgcggcctggacatcccggagataaaatacatcatccactatcacctccccgaaaagccggaatccttcacccatcgcaacggtcgaactgcccggatgaatgcctccggtaccgcttttctcctactcgacagggatgaatcccgcccggatttcctaaccgaaatcccggaaacctaccaccccgtcggcaaataccccgccccagcagaaccattctggtctaccctctacatcggcaaaggaaaaaaagacaaggtcaacaaaatggacatcgtcggtttcctctgccaaaaagggaacttgaaaaaagaagacatcggtaaaatcgaagtcaaagaccatcactctttcgtcgccgtcaaacgaggcaatttaaggcaactactttccctcatccgaagagagaaaatcaaaaatatgagagccaaaatagaactttcgaggtaaagtaatatagaat

SEQ ID NO: 236 - DNA, 6764 bp, Butyricimonas faecihominis
cttttaaccacgcattaggttgcaattatttttgttgtcaaatttatatattattatgcaaacaactgtctcactaggtattgatattggaggaaccaatatcgcattcggcatcattgataaaagcggtaactgtctggcaaatggctcattacccacaactgcatataacacaccacaagattttgtccaagacctgtacaaaacagtgaagaaagaactggacaaattagacgtgcaacttgtcggtatcggggtcggcgctcccaacgggaactacttcaacggaaccatcgaaaacgcggcaaatttatcttggaaaggaaccatcccgatggtagaacttttgactaaacaatttggcgtacctgcttttatcaccaatgacgccaaagctgccgctatcggtgaaatggtgtacggcggggcaaaagggatgaaagacttcgtcgtgatcacgctgggaacaggcttgggaagtggcatcgtggtgaacgggaaattagtgtacggacatgacgggctggcaggtgaagtaggccacacgctggtttgtggtggggatagatactgcaattgcggacgtcgggggtgcttggaaacatacgcctctgccaccggaataaagcgcaccgcctgcgaattactcgccttggaaaatacgcctagcgcgttaagagatattccttacacggaaatcacggctaaaaaagtatatgacgttgcacaaaaaggagacccgatcgccttggaggccttccggatcacgggcgagcaactgggtaaagccttggctaacctagtagccattatcagcccggaggcgatattccttcaaggaggggtagccaatgcgggagaatggcttttcaaaaccacacaggaacaaatggaagccaatatgctgtatatatttaaacaaaaaatcaaaatacttcgttcgtctcttcccacgaatgccgccatttatggagcatccgcacttgtatggactgaattaaacaattagacattaaacaccatgagaacacgactccttctactcctgctttgttttatcggtcttttgacatcttgccaaagagaaaaagaaactcgagtaacggattttgttgatccattcatcggcactgccggtcagggacactgtttccccggggcgaccgtcccgtttggcgggattcagctcagtccggataacccaagaagtggttgggagtggtgttccggttatcattacagcgatagtattatatcctcgttttcccattcgcatttgagcggaacaggtattggggacttacaggacatccgcctgttgcctgtcacgacccgcccgcaagtgggagaaaaagcgatcgatttcatcacgaaaggatatgccaaattctctcatgccaatgaaacggctgaaccgggatattacagcgtgaccttcgacaacgggattaaaaccgagttaacggtaacctctcgttgcgggatgcactcctatcaatacccaaccaactcggtttacggattaactcttgacctgacaaccgcacgtaactgggaccggaccgtgatgacctcgatcaagaaaatcaataaccggaccatacaaggataccggaagtcaaccggatgggcaaaagaacataatgtttactttttcatggaattttcccaagatgtagacgtctgggctggaaatgacacgctgaaattattaaagaacgggcagaaactggtttccaatcaaggatacgcgttcattgatttcggaacaaccaccaataaggtcctcgtgaaagtaagcctttcctccgcgaactgcgagggggccgccgcaaacctagacaaagaactttctcactggagctttgacaaagtgaaacgggaggcgaaacaacgatggaaacgcattctatctagaattaaagcagaaggtgccagcaaagaagaaacgagagttttttacacggcattataccatgcctatttggctccctatcttttttctgatgcacacgggaattacaaaggtccggacggagagattcatagcgtgggtaaagcaaatcaatacaccgtattttcattgtgggacaccttccgtgccgctcatcccctgttcacaatcacccagaagaacagggtaaatgacatgataaaatcattcattcgccattacgaagcccacggcttgctcccgaactgggaactgatgggcaacgaaagtcattgcatgatcgggaatcacgccatccccatcatcacggaggcttacttgaaaggtattcggaatttcgatgttgaaaaagcctacgaggccatgaaagaaacgtctctatcccaagggaatggactgggactattcagaacttataactatattccctgtgacctcgaaaaagaatctgtttccaaaaccctcgaatacgcctacgatgactggtgtatggcacaaatggccaaagccctgaataaagaggatgactacctctatttcatggaagcctccaagaactataaaaacgtgttcgattcctctaccggtttcatgcgggcaaagctttccgatggaaactggaaaacacctttctccccgtttgcttcagcccacagggatgatgactacaccgaaggaaacgcatggcaatattcatggtttgtaccacatgacgtggagggacttatcgcattacacggggggaaaaccgctttcgccaacaaactggacagcctgttcacccttccctcaaccatcgagggggacaatgtttcccccgacatcagcgggttgatcggacaatacgcccaaggaaacgaaccctcacaccacgtggtttacttgttcaattacacggatacgccctacaaaacacaatattacgtggataaaatcagacgggaactctacacggatcgtcccgacggactttgtggcaatgaagattgcggacaaatgtctgcatggtatgttttctctgccatgggcttttatcccatgaacccgagtgacggaaaatatcaactgggaacacccatgttcaagaaagtaacaatcaaattgggacaagatcgtaaatttgtcattaaagcaaaccgagaaaacgaccaatatatctacgtgaaagaagttttactgaatggagacaaactcgatcgcacttggattactcatgacgaaatcatggatggtggagaattggaattcgtgttaacacctgaaaatccctcaaaaataaaagaataaacagagtcaaggaaatgaaaaatatcggagtaattctagctggaggttccggacgacggttaggaagcgagttacccaaacaattcatcgtaattgccgggaaaaccgtattggcacacacgcttcacacattcgagaaacatgaacgcattgatgaaatcatcattgtcgtacacaaagattacatcaaggaagcggaagaaattgttcgccttgaaggatttcaaaaagtgaaacacattgtcccggggggcaaagaacgctatgcctccaccctcgccgctttaaacgtgtacaaggaagagaaatgtaatttaatcatccatgatgccgtccgcctgctagtcacgccgcaaatcatagaagacgtcatcgaggctctcgaaaaccacaaggcttgcacaaccgcgatcccctctaccgacacgatattgcaaagtgatacctctcgccaattcgtgaacaacatcccggatcgttccacgctctttcaagtccagaccccgcaaggcttccattccgacatcctaacgaaagcctataacaaggccctgacagatcccgaattttccagcacggacgattgcggggtcataaaacggtatatgccggaaatccccattaaaataaccaaaggtttaccatttaatattaaattaacctacaaagaagatatttctattgtagaaaagttacttttgtcctagcaaaaataaggacgtgcgtaaaacagcgaaatgaaaaaaacagcattattaatcttgatatccctactattcctttactcgcagggacaaaaacgaagtgttgattatacaacttcactcacaggattcgtggcataccagaatacattacctttctgggcaataaacaacaaacatggcttaattcccaacgggaacggggctttactggaaatcggacttttctccgatttcacggatcgccacaaaattcaattcgcgtatggggtatcagccgcaggcttcttatcccgtccggacaacaacatcattttagaccaactctacgcaagcgcacgctggcgcaaccttcgtctggacctaggaatgattcatcccaaggaagaatacaacggtgtttcctctacaaacgggaatttcgtccgttccggcaactctcgaacctttcccggatacaatttgaatagtgaatacatgaaaattccttgcactaaaggagttttatctattaaattcaattgggcagactacatgatgattgatgatcgttacgtggaagacacccgtctacacaataaatcggcttttttgaaaataaagcctcatcaacgctgggaaatcattgtcggccttgaacattgggctcaatgggcggggacctctcccgatggaggcaaacaaccttcatcattcaaggattatatccggatcatttgtgccaaagaaggaggaaccggagctagtgtcagcgattcgattaatgctttgggaaatcacttgggcagggaacacttggccattaattatttggcggacaactatatcttatctttctaccacgacatcccttttgaagatggttcgggtacggattttcgctctttcccggacggaacttattgtttctattacggttccaagaaaaaggatcaatggatcacagacgttatgtacgaattctattacacgaaatatcaatccggttcccaacatgatcgccccgccaccccggaagaaatggagaaacaagacccaaacagtcacttctatggccgaaaagtacttggcggatgcgacaactatttcaacaatggtgaatacagaagcggttggaccttatacgagagagttatcggtagcccgttcatgacacccggactttccggaaacatcacccgaatcattaacaaccgggttatagcccaccacatcgggatgaaaggtatggcatggcaaaccactccctataaactcatgctctcctattccagaaactacggtacttacgggagtcccatgaaaaagaatcaactctccggagctttggaagtaacattgccattcaagaacttaccgtttaccgtggaaacaggtatctacggtgatttaggagatctgtttaaagacaatttcggattcacgattaaacttagtcgcaaggggaaattgattaaataataggtttatcctccgaaaaatcctcaagccaagcgaaaagatctccataaaaacaaaacatagccagaaagagtaacatgaataaccgggaatttgcccaggatagggtgacgcacgtattactcacggtaaagaatacaattaacatggcaagaatcaaggaagaaaatttctttcttcgaatcatacgataaatcggggccacaaataaaaagaggactaacgccagtccgaatattccccctgtaatccagtattgcaggaaagcattattcacgttattatagtttgcaatattcaaatcagagctttcataccacgctttaatccgatgtttcgtgcagacacctaatccccatgccgagaattcatccagatggcgaaagctctcccgaataaaagcaacccggggaacaatcgttgcacccctgtattcaccattccgaacactttgaatctcagcctcaatctcctgaattctcttctcgtacatggccaaatccgtcaataacgaaaagccacacacgcaaaccaacaatccggcaataagtccatagcgcatacgaagagaaaattttcggaacaaacatacattcaagatcaagaaaccggccaaaaaacctaaaatagacgatttggtaacagtaaaagaaagaaataataccagcatcaagaacataaaaccacaaaacaacttcatcttccaacctttcgcacctatcactaataaataagaggctaaagaggcaattgcaatgatcatcgcttgagcctctaaccaaaacttactacccaacacatcccggtttaccccaaaacgcatattataaatccaacttaacgtatctgccggggctgaaaatagttgtgttcctgtcaatgaaaagaatatatatatatttagtaacgtacaccccagacagaaaaaaaatagaaactttttcaacaatcccggcgtaatccaattcttaaacgtagaaacgtacatcggaacaagtataaaattcaacaatagaacctcaaaagtcccgaaactgggaggagcgatcggctcgtctttcaaaagaacaaccaatgtatgtaaagagaaataaatcaagaaagccacgttaatcccaatataccaacggacatatcgtaaattccggagcatctctttcctgtttaccccaagcaagaccaacataaaggccaacaggacaaaattaaatacattcccgtacaatggcgctagacttcccaacaaaaaagcgacaagcaggaaaaaatattgttgaaatttcacaactagattcataactctcatttacaacacaaatatacatgatttgcttcttatactgccatcaagtatataa

SEQ ID NO: 237 - DNA, 6719 bp, Butyricimonas faecihominis
gagttataccacttgcgaaaagttgtcaaaagatcaggctctttttgcaaagttaccctcactactaatcataaggccaaaacaaatagaatttaaagtttaaaatttagaatggaaaaaacaactcctccgtcagctacgctgccacctcctctataaacagaggaggagctggtaactcttcccgaagtgggatagtaattcaactctccctctgtttatagagggagtacccgaagggggagggagttaggaaatctaaaatcaaaaaattaacacatggaatttctaatcatcataggacttatcattttaaacggggtactcgccatgtctgaaatagcgatggtctctgcccgtaaatcccgtcttgaaacagaagccaaaagcgggaacaaatccgcacaaagagcattaaaattagcgaatcaaccggatcgattcctctcgaccatacagatcggaatcacgttaatcggtatccttaccggtctctactccgggcaagccctcgcgggagacttggccgtatgggtagaaaaaatagaggtgttgcaacctcatgcgttactcatatccaaaacgcttatcgtgatcgtcgtgacttatctcacgctgattttcggagaactcgtacccaaacgtataggaatggtcgccgcagaaagaatggcaaaactaattgccgccccgatggatattctttcccgtatagcctcacctttcgtgtggttactctctgccagcacgtcattcatgatgagactattgggattgaacaaatcgggagagaacaaaatcacggaagaggaaattaaagcaatcatccaagaaagtactgccgaaggcgagattcaagaagtggaacaagacatcgtggaacgggtgtttaatcttggtgatcgggatcttggctccatcatgacacaccggagtgatctcatctggctgaacatacaagatagtaacgagactctacgggaaacggtaaacgcacatcttcacaccatttacccggtggctgacacaaaattggataatatcgtcggcatcgtctttctgaaagaccttttcggaagaatggatgccccggattttgacttgaaagccattgttcgcccacctcagtatttcccgcagaatcaaagcgtgtataacgccatggaacacttgaaacaaggacacacgaaatatggactggtcacagatgaattcggaagtatcgaaggtattgttaccttacaagatattctgaaagccttgatcggagacttgccggaacttggggaagaaccggatatcgtgcaacgggaagatggtacttatctcgtagacggccaatgccctttctatgatttcttggcccatttcgacatggaatgtctttacacgaaccattactacaacacattaagcggactgatcttaaagattttggaacatattccccagaccggagaaaaattgacatggtataacttcgagtttgaaatcgtggatatggatgccgctcgaattgataaagtacttgtcaaaatcaacaaagaaactgactaaaaagtcaattttaaataactaccccctccaactcccccttacacagggggagttggagggggtagcttgtagatacgggataagactttttagtcaacctctttatgatgactgcactgatgttctccaccctcgtgatgatggtggcaaccgatgccggaatccaaaataaaccctttcaaataaccttccgctattttccggacatcccctttacaaccacggaaaactttaatcccttggtcacttaatacctttaaagccccgtcacccatactaccggcaagcattacggtaacccctttttctttcaacacggaagcaatgttcgatttacaaccgcatccttgtggagaagggagtgtttcaatattcgtgatatttttatcgtcatctaccgtgaacagcgtgtaatacgcgcaatgtccaaaatgatcatcaacaacgttttctcttgttggtactgcaattttcatgattcaattcctttcttttatataaataaattctctgttatcctttgaaatatttatccaaacaaaggtacatgattttttcaaaatcgcctcgtatatccatgacaataaggcaaagtccctttcctagtatagtaattctgatgataatcctctgccacccaaaatgttgtaaccggagctaaccgggtcaccaccgcatagcctttctcttttaactcctgtatcagcttttcagccacggccttctgttccggactattgtagaaaatttccgaacggtattgctccccgtaatccggaccttggtgatcttgttgcgtgggatcatgtatctcgaaaaacaactttgtcaacgtctcgtaatcagtcttcgatgcatcaaacaacactcgtaccgcctccacgtgtcccgtgtttccctcacatacttcctcgtaagacggatcttccacttttcctccaatgtacccggactcaacggcaagcacgccgggtgcctttttcatgtaatactccactccccagaaacatcccccggcaaaaatagccgtgtctattttcaattcttccgcaggaataaattccatcgaaatcgaattcacacaatgacgggtattctttggggtaagcccctctcccgtgaacacgtgtcccaagtgcgctccacaacgagcgcagacaatctccgtccgtctcccatcagcatcaggtacccgtttcaccgctcccggaatctcatcatcaaaactcggccacccgcaccgggaatcaaacttatcctccgaacggtaaagcgggctcccgcattgtttgcaaacatatgtccccttcgccttgaaatcataatatttacccgtgaaaggtctctccgtccccttataaataatcacttgtttttcatccgctgttagctctttcttttgtgccataatcatgtagtttactaaaaacaacatcaagaataatataatttttctcatcatcgctcttttaaactctgaaacgtatttcccggcatttggttatttatttttaatgacaatataacaactttttgaatgcatttcacatataaagaaacaaactaaactttaaaaatatcagaaaaatgactacaacaagtgcaacaacatctaccggtcccaaggggttcagatggctatacctaatcctaggtatcgtgttattcgtttttggcatcggcatcatccggcatccggtggcatcttatttcggattggccatgtatttcagtatcgttatcattgttatcggaatcagtgaaatcatgaacgctttcgcgggcggtaactcccggcattggggatggggactgttcatcgggttactcgacctgattatcggttttatcctgttaatccacccgatcatcacggaagacatacttccttacatcgtcggctttatcctcatgttcaaaagcattgattacattgccgaatcattacagatgtcatcgctaaaaatcagaggatggggatggatattcatagcgggaatcatcaccttgttcttttccttcatgatcgtcttctatcccctgttcggaattttcaatatcatcatctggacgggacttagtttcatcttcgccggcatctcttcatttatatatgcctttgtaggaagaggataacaaactaccccctctaactcccccttacacagggggagctggagggggtagtcattttatatttaacagtaaagctataaacacattcactcgctttgccacacgaaatattccggaaacgccttttctgcctccacgggatgatggaacaacccgtaaacggctgatccacttccggtcatggaaacataaatcgcacccaaatcccgtaatttattctttatttcttctatctccggtactttaggaaccacggaatcctcaaaatcattcacgatcactccggtccattgctctaccggcaattttcccaattctcgcaaatcaaaagaggccgcacgaggcgttattccccggtatgcctcgggagtagaaactccccgattcggtttcacgagtaccatatgatagtcctttaatgacaaatctatcgtttccatcaactcgcctttcccaaaagcaaacacgggatgattcaaaacgaaaaaaggacaatcgcttcctacccgggctgcatatcccattaattgttcctcgttcaaccccaaggaaaaaagctgattcaacccaaccagcataaaagccgcatcagaggaaccgccacccagtccggcaccgtatggtatgatcttatgcaaatgcacatctaccgagggtaaatcatactcggcagccagaatagcgtatgccttgctcaccaagttcttttccggcgggcaatctatcaaaattcccgtggaagtaaaaacacaacgcccttgctcacccttcacctccgtgatttccagtatatcccgaagatcaatcggataaaaaacagtttccaagttatgaaatccatccgatctcttctccgtgacgaacaaccctatattaatctttgcattcggaaatattaccataaactcatcaaaattaaaagacccggcatccgccgatctactatttgtaattcattcatttgcaaacaataaaaccattcgaacaaatccatattgccgaacaattttgcaaatataccgaaaaatgatatatttgctctccaatcatcccctcaaatagcggctgaacattatttatttaaacttatagattcaaatttcatgttagaatcactacaagcactagatcgtacggtatttcttgccttaaacggaatgcacaccccttatttggattccttcatgtacatattcacgagtaaactcgtatggattcctctttacgcgtccatcctgtacgtcttgtataaaaacatgaatatccgcatggtcattttcactactttgatgttcgccttgcttatagcattggcagaccaaacatgtagttccctcctgcgccctatattcgaacgtcctcgaccatcacgcgacccggatattgcagacatggtacatttagtcaatggaaagcgaggcggaaaattcggattcccctcctgccatgcggctaacacgttcgcattagcttgtttcatgatgttactgttcaagaacagagccttaactacattctttatgctatgggcgattgtaacttgttatacgagggtgtacgtgggagtacattatcccggagatctacttttcggaacagttgtcgggtttgccgtgggagccgtcacttatggaatataccgtttctgtcttcgggtggatagcattgccaacgggctaaaatttcatctagatcgtaaactcgtgaaacacccataccacatacaacacacgtcaatcattatttacacgggattactcacgattgccgctttcgccgtgtatagtatctggtggagaatctaataattttagatttatgattttagattcggcagctctagctaccgtaagcaaaatgtcccacaggggtctgcaaaccttatgaaccttcaactttataaaccttataaactcaataaatagtataatcgggagtgtcaaaagttctttgacactcccgattatactatttattgatagcacgattaaactcgtccaataaagaacggaaagtctctttcactgaaacaatcttcgtggcccggaaagcattcgccccggcaaaagcgtaaccgttatccatatttcccttgaaagcgttgtacaaagccgcaatgatacaataaggactcttgcttatatcacacgttttgatacacttgcacatacacgttttgggctgtttctgcccttccttcaccttttggataaatttgctgaatatcgcccgtcccggcattcccaccggacttttgataatctgtatatcctcctgtttcgcctcgatgtaagtctgtttgaaaacatcggacgcgtcacactcttccgtggtcacgaaacgagtacccatctgtaccccggacgctcccatatccataaaacgtttaatatcttcacccgtgtagattcctccagccacgatcaccggaatatctttcccgtaatgcgtttcgatattcttcacttcatcaatcacttccggcaaaatatgttccaacgaaaaatgctcgtcattgatttgttcatctttgaacccgaggtgtccccccgctttcggtccttccacgacaaacgcatccggcaggtaattatataaattatgccacttctcggcaataactctggccgcacgtgcagaagaaacgatcggaaccaacttggtcacgctatccttttgcaagaagcttggcaaattcaacggtaatcccgcaccagagaaaataatatccgccttttcagcaatcgccgtcttcaccatatccgcaaaattagacatagccaccataacattcacgccaatcacacccttcgttttctcacgagctttacgaagttcttccttcaaacccatgatactagcctgaatataatctttagataaattccgatataacaaacctaatccggcactggaaatcacaccaactcctccctcatttgccaccgcggacgccaatccggaaagtgatataccaacgcccataccaccttgtacaatgggaactgaaatagagagattcccaa

SEQ ID NO: 238 - DNA, 6693 bp, Butyricimonas faecihominis
atgatacagctcctgaggtttctgctacatcttccggaatgaatgataagagtgtttttatgctggacgaaaagaaaggtatattgtactacacggacggggggaataatatattccggtataatcttatttcgaaagggaatttcgagccatcagattacacggtcggtaatgacggggatgtgattcagggtatgcttctggatcaggatgagggaaaattgtatgtggcggtcaatgccaaagagggtgattaccggggatgtgtttattgctataacagcgtgacgaaagaattgctgtgggaggaaagaggtgtagccggggaaatcgtgcagatgatttataaagataaataacgcgagtgcttcgtgctgattgaatgtttttttattcgtgtgctttttataaccggaatggtattttaccattccggtagtatttaactataaatttacggaatcaatgaaaaatcttatttttattcttatttttttgtccttcagttttactgctttatgtcagggaggggtcaattttgagcaactgacttttgatgaagctttatctaaagctaaggctgaaaacaagcttgtgttcatggattgttacacgacttggtgtgctccctgcaaatatatggctgataatgtctttcctcgagaggaggctggcgagttttttaacccgaaatttgtttcggtaaaatttgatatggaaaatggggaaggcaaagagttggctcaaaaatttggagttcgtgcttatccgaccttccttatcattcgtcccgacgggagtgtgcaacatcgaattgtggggggcgtgaatcttgataaatttattgaaatagcggaaagaggcttgaacgtgaaaacatcttttgactatctcgatagattgcacgagaaagggaaaatgaataaaaaacaactcatctcgtaccaaattgcgttgaatgacgcgtatgaggaagaaaaaagcaataaggttgcccaagagttaaagtcgatattgaaggaaaaggataaaatgcaaaaagagtattggcctattcttgaaaaggaaagtttcggttctgatggatttaaactggttttgaacaacctctctacttttcggaaaaatgtaggtaaggaaaagatagacaattatttattcgagaattatttttccactatcggtgagtctttaaatgccgacgcaaagccccacggagagactttaaaacagataaaaagtgaattggaaaatctcgatatagatggtaaggatgttttattgtctactatagaattgaaccaagcttgtttgatgtcggatataaataagattatttctatcgcggaaaaaatcaatactaacgaaaacggggaactctggtctgccatggaagcacttggttttattaaaaacaaggcttcaaaggatgatttgaaacgaatccttcgtttggaagaacaatacatgaatttggtcgaggatgataataaagagtttgtgaaagattattttgcagattttaaaatagctatgatcgatggcgttaattttcaggatttaagtttcgaggaggctttagaaattgccaatcagcaaggtcggttcctttttgtcgattgcaatacaagttggtgtgaaccatgtcgttatatggagaatgtcgtgtttaagcaagagaacgtgaggaattttatgaatgctaattttgtctgcgtgaagtatgatttggagaaaggggaaggtcccatgttggcgaaaagatttggaatacggtcatttccaacttttttacttgtggagccagatggaagtcttcgtcacaagatcgtgggtggcacagattcggagtcctttgttgcactcgtgaaagaaggactggatgacaacacggcgttggggagtttgatgaaaaaatatgacaacggggaacgggataagaagtttttagcgacttatatccgcacgttggttgagcttgatgagcctatcgcaaaagaagtcgcgaatgaactatttaaaatactcaatgatgaagagagattttctgatgattattggtttgtttttggctatgttgaattgtgtccgtataattctgagattgcgaaattcttgacagcaaacctttccaagttttaccagactattgggaaagaaaaagttgacagtcgtttgcgtgatggatatatggatgatattatgaaggtcattagcgggagagaaaaagacatcgatatgaaacgtctgaatgtaatcggacaggaaataaagacgctgaaattgtctgatgaaaagacgatactatctgcacaactaatagctaaggctataaaaatgaatgatgtagatcgacttttgattgtttgtgaaaaagaaattccgaatctgggaacatgtaaggatgatgttgtttattatttgtccggatattttggaaaagttagtgatgtgcaaaaggctaaatggaaagaaatacaggatgcaaaccagtaaatcctaggcttgctggaagcgtctcttttacgagagacgtagacagaatatgaagagaggggctgtctaacaagtctatcttttaacgacggcttctcctaattcctccttacgcagaattggaaaacgcttggtaatcagcttttctcttgtgtaaggtgaagttggaggggcagttggtaaatatcaaataggacttcttagataacccttcttgggattgctggatgataaatgaaaaatgatgggatatataaaaaattctaatgaatgattaggtatgttgtaaacaaatagctactttcgcagcgggatcgacactaaatagacttaaagatgcctgtcgtgtcttgttgtgtttcataaagtaatatattatgggtagtatgttgttaaaagtgatttgtgggattatgttcctgttaggtatgtcgtggaatgtcatggcaaaagaggtgattaaggggagagtcgttgattctcagtcaaaagaggtgttgatcggggctaccgtgagcgtggagggaacgagtgtcgggtgtgctacggatgcggagggatattttgaattagaggtagaagagtcgggaacggttgtattggtgttccgaagtgtaggctattcggaagtgaaaaaaagtgttgttgtggatgataaaaaggtggatctggggaccgtggggatgttgccgatgtatattaatttgtcggatgtggtggtgcgtggttctttagccgtggaccggaagaccccggtagccttgtcggtagtgacggcgaaagagatcgaggagaaactttcaacacaggaattcccggagatattgaaatctttgccgagtgtttacgccacgaaagaggggggagcgtttggagacggacggattaatttgcggggattcgagacggagaatatagcggtgatggtgaacggagtacctatgaacgagatggaatggggaggtatctattggtcgaattggtcgggtttggctgatgttactcgctttatacaagtgcagcgaggattgggagcgtcgaaagtgtccgtgccttctgtcgggggatcgatcaatatcgtgacgaattcgacaaatgcggtagccggaggttctgtttcatacggtgtgggaaatgacggttacaataaggtcgcatttaatctttccaccggattgctgaagaatggctgggcgatgtctattttgggggcgagaacttggggagatggttatatacaaggaacggatttcgtagggtattcttattttgtgaatatttccaagcggttgggtgaaaatcatcaattgtctttaactgcttttggtgcaccgcaatggcacaaccagagaaaccggaatgacaagatgacaatcaaatcatgggatgagttgggggatacccagtttaatccttcttacgggttcgctaaccgggatggaaagaatgtgcgtaaagtatctgcttataacaaatatcacaagcctcaggtttcgttgaatcatctttgggagattaataataaatcaagtttatctagcgtgctttacatgtcgttgggacgtggtggcgggtatagcggccagggaaaatggaaaaattcatggtacgggacgaccacggctggaactttaggggttaatcgtgcggaagataagacctttgcttacgatagtgtttataaatggaatgaaagtagccagacgggatccgtgatggcgatgtccatgagtaaaaatgaacataactggttcgggttgatttctacctatacaaccaagttgggacagtattttgacgtgtacgggggagtagatttgcgttattataaaggtaaacattataacgaattggtggatttgtacgggggggagtattttattgatcctagtcgaaagaatgtgaagtacaaggctgatgataaggattggcaagaggaacatttgcaaaaaggagatattattttccgggattatgatgggttcgtgatgcaggaagggttctttgcacagggagaatataaccgtgaagcttggagtgcttttgttgccggatcggtttcaaactctacttattggcgaaaggaccgtttttattattccaaagatgaggcaaagtccgataaagagcatttcacgggattcacgataaagggtggggctaattataacgtgacggagaagcataacgtatttgctaatatcgggtatttttctcgtccccctcacatgcagggtggcgtttttctgcaaaatgatgtgagtaatattgttaactcggatgcgatgaacgagaaagtgttctcgatagagctggggtatggattccgttcttcgtggttaaatgcgaacgtgaatttctaccggacggcgtggatggacaaggccacaagggtgaacgtgaaagaagatcgggatgcttttgcttacctgacgggaattgatgctttgcatcagggaatagaggtggatttcgtgttacacccgatcgtgaatcttgatattacaggagtgttttcgattggtgactggcattggaatggtgatggtaaaggatatgcttataattcggcaggccgacctgtgggtaagaatggtaaaccgttaggcgatgtgggaggggaagaacatgctcaaagtttcataaaagtgaaagatgttcgagtgggaaattctgcacaaacaacttttgctattggaggacgttaccagttcttgagagggttgcacgtgggagttgattattctcatttcgcacgaaattatgcgaaattttcgttccccacggtaaatctggatgccgagaatgtgattgaatctccttggaggatgccggcatatggtgtgttggatgctaatatcaactatcgtttcccgttgagtaaggtgtttggcgtgatggtttctgcgaacgtgaataatcttttggataaagagtatatcgctgatgcggaggatggtgccgggcatgataaagatacagccaaggttttctatggtttcggacgtactttttccgtgaacttgaagatcacgttctaagattattgagagtaaagatgtagttattttgtgtataataaaatacagtaattatattttttatacatttgtggcgtttttctccaattttatttgagaaaggttgcaatataaactttaactattttaaaatgaaaaaaatcgtatttttagtactattggtagtattacacatttctacgtttgcgcagaataatcaagaaaggaaactgccgggttataaaacatcatttgaaaccaataaattttgggataattggtttatttcattgaatttaggggctcaaaccctttatgcagaggggtctactgatgcaaagttcggtgatcgattaacctttatgcctgccttgtctgttggtaaatggtttacgccttggtggggattgagagttcaaggtttgggaggtgctttacatggttttcaaaatgatgggaaaatgatgttgcacaaacattatggagctgttcatggagactttatgtttggtttgttaaacttcttcggtcgttacaacgagaatcgttgctttgatttgataccttttgcaggaataggtggtgcttttatcggtagtgatcaatcttttactattaatgctggtattcaagctcgttttcggttatctcaacgttttgatttgaatttggaatatggtgggataattttggatgatgatctcgtgaccagaggcggattccctaatgacgggattagtaatctgagtgttggagttactttcagatttaaaaatcgttcgtttaaaaaggctgttagccagaaacagtatgcagaccttcagaatttggcaacagcacaagacgcacgaatcaaagaattgattagccgtaccccggataccgttgtcaaagtggtaaaacaagagatgccaacaactgaaactaaagtggtgtttaaggctttaccgacaacgataaacttcgctttcaacagttacaaaattgatcctactcaggaggttggtgtttataacttggttcaatttatgaaagaaaaccccgatgtgcgtgttcgtttgacaggttttgccgataaacgaggaactgagaaggccaatatgattatttctgaaaagcgagtaaatgcggttgcagatatgtttattagtaaatatggaataaataaagaccgtat

SEQ ID NO: 239 - DNA, 6671 bp, Butyricimonas faecihominis
attgtgcccaatacgtattttgtcttaacaaactattatttttaaatgcagaatcgtggatcgggtaaaaaatagccccacttttcacgtctgcaatggtcatcgttttgaaggcggtgggttctaaataagtattgatgtattccatcccgttccgaacgacatcgtagaaccggtgaccttccatcaacaattcccgttctctctcgtggaaaatagcgtatttcaatcctttctcgtctccactactattcggataagcttttgcccggttataacttctgatctcgttcaaatctttttttgccaaactttcctcacccactttaacgtaacattcagcgcgtaacaaataaatatcagccaaacgccaataggcataattagacttcatcgccaccaatttcaatagattcggattataggcatccttttcatatatcccgacccgccatctataggggaaagcgtaacctccggtaattttgtttatttcatctcgaacactatcccggttatactgtctttgttcttcggtgtattcatcttccatgaacatcagttccaccgtatccgtgctgtaataagcatatcgataaaaataagcttgcggacgtaaatccgattcatcatacattgattttatcgttgaataggcaatcaacgcttcctctttcttatatttatgctcgctcgcggaatagtccagatgctgtggataaccgatatatttttgtccgaacaggtaagtcgagaaaatatactcgtcctgcatatccaaggtatattcaaaaattgactccggattattcgcctcgttatcagagaaaagttgagataacttttccggatcacgaaccaacgtgtaattcccgacatctcctttaatcagatacccggcgtattcgatggacttattataacaatcctttgaatcaccttcaagttcgagaagatcgatcatactccctttccacgcataagcatgagcaagcaaggcacaagcatttcccttactcccgaattgtttggaattaatcacggcacccaatcgatccaccacggccccttgaaccggcaatatgttaaaagccctcgtggcattcgcaatcaccgtatccagaacctccaataccggtttcttcccgtaaggctccgaagaagaactgtttctagtgatcggaacttcgccgtatgtacgacttaaataaaaataacttaatgctttcgcgaaataagcttgagcccggtaaaaatctaaccgttccggggtaacatttccctgggcattatgcatattatccagcaacacgttggccatgtatatcacccaataacgttcagtccagtcggcagaaccggtaccgttacttccaaccacttttatcggatcccatgcctggcgcaagctggatgtcacttccctaatatcccccatgccggcatggctcccggcaccaccaactcgccacacgaaactctgcatttgatacaaagtcacttctagatcctgttcggtcttgtaaaaattatcaaacgtaacttccgtttccggctctacatccaacagactgtcacacgaagcgagcagagcgatcaataaaatatagagtatttttttcataactaaaatttaagcgttaaacctaatgtcaccttccttgcactcgggtaattggtcatcttgtccagcccttccattacatccacgttttccgggtcaagaccggaataattagtccacaagaacaagttttctcccgtgaagaatacacgcaacccctgcaaatgaattctcttcgcccaagctgccgggagattatatcccaaggtcaattgtttcaaacgaaggaaattcactttttctatattagaatcaatcaaagcatcatactgtccgtaatagtaactataaacagaagacattatcggataatcagcattatctcccggtttttcccagaaggaaacattccggtaatcttcaaaaatagctcccgttttacctgatgactcaaacatcaacgaaccttttctaaagacattaatcatcttccgtcctaaagagtaattgaacaaaagattcaaatcaaaacctttccacttgatttcatgagcaatacctccatgagcgataggcagggtcgagccggcgaaatacttgtcatcttcagatataatcccatccccgtttaaatcatcaatcaaattcattcccaaccgggtaggctgagccatacctccatcacctagtggttttgggtttcctttagtatcgtaataaattgggacctcagaatcactctgaaccgttccaagatttctgaaaacacgcaactcattggccgaacgtccgatcacatatttctggtcaacatccatacccgtgttcgttttctccaaacggttccaatttctggaaacattgaaacgcatccgccatttcacggccgtctcgcgcaatatatccaattgagcttccaactcgactccctcgttagaaatctccaaggcattatcccacaaattcttgtgaaaataaaccgttccgggaagatccacctgccacaacaaggatttcgtgtatttaaaatagtaatccatcttcaatttcaaccggtaatcgaacaaatcgacatccaaaccgagatcatactgatcggatttctcccatgtcaagttccgattctccatttgtgcaggaaccaatccggcaacccccaagaaagaatccccctcaccgataactccttgcgctaaataaggatccaagaaaacctgtccggaagaaccccaggaaccgcgaatcttaccgtgactcaaccaccagaaattttccataaaagcctcgtcagagaagttccatcccaaagcaacggaagggaaggtcgcccaacgcacatctttcccgaaaacggatgaaccatcccgacgtaaagtaagttctatcaaatatttccgatccaagttataggctacccgaccaaaataactgaccatgatcttctccttgaaatcagaattaaaagactgcatcgcgttcattaccccatcgatctcctttagcgtaggcatcaccgacgttacataatgaatataattactgggggctccttttccttttcctttcaagctattcgaagcttcacgggtgtaagaaaaacctaatagccaatcgaaattatgacgttccttcaaactgaaattataatgcaataactcttctgtttgaagcaacacgctcccctgcatctgcccgtacgaaacgctcagtccgttattaaagtccatcgtactcggctcaaaacggtttacttgagattgggtgtagtccactcctaacgatgcggaaaaatccaatccctcaagaatcttataagctaaacgaatatttgaacgaatattataattatatttcttctcagaaacatcattcaaattttcaaatattttatcgtaaacttctccttcagcacccagcatagttgaagtacttttggggtttaccgtcatataagaaatattatgacttcccaaaccacctgaagccatactcatatcagaataggacatagccaaacgaatatcgaaagtaagattcttccgcggggttaaattcaaattggaaattaaatttgcccgggagaaatcagaaccgacattgatacctttctcgttgtaccaaccaagtcccaccatatatttcacccgttccgttcccccggaagcctgaagattcgcgttcaacgttttccccgtgtggaaagcatatttccaccagttcgtggaattattataaaacggattcaaactatcctgcaacaacctatttagaggaggagcactaagtgcatttgaaataccattatgccagaaataatcatagaatccggtagtccctatcgcctcttccggagaattgggaagatgtaactgattattggaatcgaaataaccgagtactacatgtttagcagcctccagccaccatttacgttccccgttaccttgaatctgaaggggcgtttccgggtaccatgtccatgaataagaagcatttgcctgaaaagtagcctgcccggctttaccatgcttcgtggtaatcaaaatcaccccgttgctagcacgtgaaccgtagattgcagccgatgcagcatccttcaacacctcgacggattcaatcgtcatagggtctatctccgccagcgtgttggtacctgttaaaggagatgtaaacgaattaaccggtacaccatctaccacgtacaatggagtattttcactgatacccttgaccattaaagtattgtaaccacgaatggcgacacggctacccccacctccgggagccccggacacgttattcacctcgactccggccatgtgaccttgcaacagattctccaagctggcagaaggaacttcctccaaatcttttgccttcacggatgacacggaactgatcaattcctttttattacgttctccataagcgatcacggtaacttcatccaagtcagagacctcctctttcagcatcacgatcagctcatcgccggccttaaacgttttcacttcttgtttgaaacccacgaaagagaatatcaacttacctttcgaaacaggtaacgtcaaggaaaacaacccggctgcatccgtggaacatcccaccgtggtactatccaaacgaatggtcaccccggggagcggttgtttcttttcgtcgatcacctttcccttgataacgaatttctttacctccttcttttcatccttagcgacagagggttttacaataataacattcccctcaaacaaaaaatccaaacccgaaaaagtacgtttcaataaaatttccacggcctcatccttggcggacacggaaatgttgttaaacgagaccaaatcggcatcattgtacacgaaaaacaaattcgtctccttctgaatctgtttaaatagttccatcgcaccaacattcttcacgtccaacgtcacccgctgttcttgcgagaagccattggcagaaatcgtcatgctggtcattgtcatcaaaataaataataacctcatgattttcaataaattctttttaccatagaaatagtaaaaactttggttttttttcatacatttgatttttgaattaaaaaactacttgggtaaacattgtcgcatttgtttacccgaatgaattcaaactccggataagtagccgcttgtccggaattttattttcgcacgattatcactctaccttttatctcgaactgcacatgggatgtcttctcgatcagagacaacaacccattaatttcctcgtaacggggcaaatacccgctaaaccgttcgtttcttacctcgttattcacaaagaacacctgaatatcataccacaacgatagttcatccagtatctcgcctatactcttgttctcgaaataataatttcctcgctgccacgccacgtaagataacacgtccacgtcccgaaccgtaacccgtcccgcgagcttgttaaacaccgcttgctggttcggtttcaacatcacttccgccaatcccttcggtttcaccgacacggaaccttccaccaacgtcgtttggatctggtcatcccgacgagagttcacgttaaactgcgttccgtacaccttcacctccatcccgttcgcctccacgataaacggtttctcggtattcttcaccacctcgaaataagcctctccctccaaccgtacccgtcgctccttacccgcaaacttcaccgggtaacgaatctctgtcgccgcattcacccacactttcgtcccatcggccagcatgatcgtgtactctccccctttaggagtaatcaagcgattctgtaaattaacatcctgatcatccagagaatccacgtaaaccaacgcctgatcattcgtgtgaatcgtcaccccgtcaatctctttcagtgtcatccgggaagtatcaagagcaaggactttcccgtcattcaacaccaacgtcgcttttctcacgccatgctcaataggcccgataccgtaatccacaacttcctccacggattgccttgtccaaagtaacattcccgcaataatcggtaatgccaacattgccgcgtaactcaccaccttcaaccacacccgtcgtccccgtctccggtaagcctcgtcaactctcgtctcgaaatcctgtttaaatcgtttctttgtctccacgctcaactggaaattctcccgcctcgccacgaaacgtttcatctccccgtaaagctgtcgatgtctttccgattcatccagccaagcttccaaaacctgcctatcctcctcatccagtgaagaagtaaagctccgttttatcaacctccaatctattttcatcgtatttttctaaaaatttcgtccctataacacgaaacctcgaaaaatgtttacaggagaaatgaaaaaatttcagaattttatcttatcattaaaatcaaaccttccatttgcgagtgataccgtttttttgaaactcgattatcccccgcaatttcataaatgttgcgagcaagaaaaatctgaactaatgtgaaaaatcgtaattataatttcatcatccagttatcatattgcgagccgctcccattccgctcccattcctcccctattcccctcctataacaa

SEQ ID NO: 240 - DNA, 6641 bp, Butyricimonas faecihominis
ttgtacttatgcttggcgtcacgggaattgcttgtgcgcagatgaccgatgcgcaagttattgaagccgtgaagtccgcacaggctcaaggaaaaagtcaagacgagattattttgatgttatcgcaaaaaggcgtcacgaaagagcaggtgttgagaattaaggagaattacgagagagaaaatgcaggaaagcagggaggtttggctcaagaaaatagagagcgtattgaaactatctcgttagagaatcgggatgtggtgttggttacagaaggggataagaatagtattttcgggcggaatttgtttagtaataaaaatttaacttttgaaccgagtttgaatattcctacaccggagaattatgtgttggggccaggagacgaggttatcattgatatatggggaaattcggaagcgactgttcggcaggtgatatccccggaggggagtataaatgtatcgaatataggaccgatttatttgaatggaaaacggattcaagaggcatcttcttatttaaaaacgatgtttagtcgtatatattcagatttagcgtcagaaaatccatcaacatttttgaaagtgtcgttgggacaaattcgaagtattcaagtgaacgtgatgggggagattgtcatgcccgggacctatatgttaccctctttggcaacggtgtttcacgcgttgtacgcggcaggaggtgtaaataacgtgggaactttgcgggatgtcgtgttgtatcggaatggaaaagcctttaagcacgtggatgtttatgattatatcatgaatggtaataatagttttgatattactttgcaggatggtgatttgattaacgtgggtacttacgagaaaattgtcactgtggctggtaaagtgaaacgtccgatgcgttacgagatgaagggagaggagagtctgagtaaattattggagtatgctgggggatttactagtgatgcttacaagaagaatgtgaatgtgagccgtaagggagattccgagtttcaaatatatactgtagataacgaagattttgttgattttacgttggctgacggtgattctgttatgattgatccgatcataagtcgatacgaaaatcgcgtaaccgtgacaggagcggtatatcgtcccggaaattacgcgataaataattccataaagacagtgaaggatttgataaacgtggtggaaggaccgcgggaagatgcctttttaaatagaactattttatatcgagagaaagaggatttaagtcaagaaatgcttgctgttgatctgggaaaattgttaaggggtgagatcgacgatattccattgaaaaagaatgaccgtttgtatgtaccttcagcaacagaattgcggggagattacgtgattgacattcggggagaggtgaagaatcctcgaaaatatcctttcgtggataatatgacgttggaggatgcagtgttacaagccggtggtttgttggagtctgcctctatggtacgggtggatgtttcccgaagaataaagtctcctaatagtacggaggaagctccggctgaggctgaattatttacatttggtttgaagaatggtttggttgtggagggagatcctgaatttacacttgaaccttttgatgagatatatgttcgtcgttccccgggataccgtgaacagcagaacgtgatggtgaatggcgaggttctttaccctggtgtatacgcaaagcgttcatccaatgatcgtctttctgatattgtaaaacgggctggcggggttacttccaaagcctacgtgaatggggctcgtttgttgcgtcggatgaatgctgatgaattggcaagagttagttctgctttgcagttagctaaacattccagtcgtgattctttagtgatagatagtatgtctttggaaaaggtttattacgtgggaatcgatttaaaaaaagcattggaaaatccgggaggtgaggcggacttggtacttcgtgaaggtgatgtgttgcacgtttctaattacgtgaatacagttaagattagtggtgcggtgatgcatcctaatgctgtaacttatcacaagaaaatgaaatataaggattacgtggaaaatgccggagggtatagtgttgatgcgaaaaaacgaagggcatatgtgctttatccaaacgggacgcttgccgtatgcaagggaaatcgtacaaagatagagccgggatgcgagattattgttccgttgaaatccatgaacaaaaatcggatgggcttaccggaaattttgagtttggcatcatcaacgacttcgatagcggcaatggttactgcaattcttaacaacacgaaatagtatggaacaggaagtaaagcaggcaaatcagatgccacaggaggaagaaattgatttggtcgaggtggtccggaagttgtggaaaaaccggaaactgatactgaagattacagtcgtgtttatggtactaggggtattagtggccctgtttagtccgaaagaatatactgccggatgtacgatggtccctcaatccggggataagaaagtcggtggaaatttgagtggactggcatccatggtcggaattaatttaggtggggcttctggtggtgaggttttatctccgacaatttatcctaaaattgtggcaagtattccctttaagaaggatttgatggcgaccccgttgaagtttgaagggtatgatcaaccgatcacgttattggattattatacaaaggatgaataccagaaatttagtttgggaggtacaattgcgaaatacacgattggtttaccgggagtgatcataaatgcaattcggggagaggatacaactatgatttctgcgggtcaagggagtgcgattcagtctctttcaaaggatgagaagaagatgtcggagatgttgaatgatatgatttctttgaacgtgaatgataaagacggttacgtgcaattgtctgcgtcattgggagaacctttggctgtagctcagttggctgaacgggctcaagagttgttacagacgtatattacggattttaaaatcgagaaggtgaagtcaaatttgactttcgtggagcaacaatatgatgctgcaaaaaaacgttacgagaagatgcaggatagtttggctcgtttcagagatgcgaacaagagtttttcttctgccgtggcaaagactcaggaggaggctttaacgaatgagtataatcttgcttatagcgtgtattccgagttggcaaaacagatggaacaggctaagattgccgtgaatgaaaccacaccgattttgacgatcgtggaacctgttgtagttccgattgaacgttctaagcctaaaaggggattaatttgcgtgttgtttacgttcttgggaggttttgcaggagtgggtacggttttggcattacctttcgtggctaatgtttttggaaatgataaattgaaacggtttataaaggaataagtttgtagccggggatccggttttcatattacaggaggtgtgtcaaatgtattggcatacctctttttgtgagaagttttttacctttgcggtatatggggactggagcgtgtgataaaatatttgatagtttttgaaaatgattgattttgaacagttagcacgaaatatgaagggagacgtgatgacggattctcttcatcaaatgatttatgcgacagacgcatcggcttatcgggagataccgttggctgttgtatatcctcgggatgcctcggacgtgaaggaatgtatcaagtttgccagaaaaaatgggattacattgattccccgtgccgcgggaacttctttagcggggcaggtggtagggaatggggtggtcgttgatgtgtcccggtatatgaatcacgtgctagagataaatgaaaaagagcattgggttcgggttgaaccgggggtagtgctggatgaattgaatatgcaggtaaagtcgttgggattgttctttgggccggagacttctacttctaatcgttgttgtctgggaggaatggtgggaaataattcgtgcggttctcattctttagtgtatgggagtacccgggatcatcttctggaggcaaaagttattttgagtgacggggaggaggcttggttgaagggaatggagaaagatgaggtgaggaataaaatggcggaagacacgttggagggaaagatatacaggtgttctgtggagatgttggaaaataatagagaggagattattcaacattttccggacccggctttgcggagaagaaattctgggtatgccattgatcaattgttgtactcggattactttgatgttgtttatgaggaaaagtttaatttgtgcaagttattagccggatcagaaggaactctggcatttgtgaccgagttgaaattgaatcttgtcccgttaccacccaaagaaaaggcggtaatttgtgtacattgcaggacattagaggaggcgtttgaggggaatctggtcgcattgaaacaccacccggtggctatcgagttaatggatcagaatatattagaactaagtaaaggaaatatagaacaaaataagaaccgttttttcgttcaaggtgatcctgctgcaatactgattgttgagttggcacagaaaagtagggaagaggtggatcgggtggcagaccagatcgaagcagatatgaagatgcacgggtatgggtatcatttcccgcgagtgtacgggagtgatattaatcgggtgtggagtttacggaaggcgggactagggttgttgtccggaatgccggggaatgcgaagcccgtgtccgtgattgaggatacagccgtggctccggaacggttacctgcttatatgaaggatttcggggagatgctggaacgactgggattgaagtgcgtgtatcatgcacatatcagtacgggtgagttgcatttacgtcccgtgttgaatttgaaggaggagaatgaccgggtgttattccggcgtgtggcggaagagacggctaagctggtgaaaaagcatcgcggctctttaagtggagagcatggtgacggacgtttacgaggggagtttattccattgttgttcggggagaaggtgtatggcttgatgcaggagactaaagcttgttgggacccggagggtatttttaacgcgaggaagattgtgaatacgccgcccatggatacctctcttcgatatgaggtaggggattcgaacgtgacgtgtcgcacttattttgatttttcaaaggaaaaaggttggttgtgtgctattgagcaatgtaatggttcgggagattgtcggaaatcatatgcttttggtggtacgatgtgtccgagttttcgggctacgagagaagagagtcatacgacacgggctagggcgaatacgttacgggagttgatgactcgtccgaaaacgaaaaagatatatgatcagcgggagattttagaagtgttagatacctgtgtttcatgtaaagcgtgtaaatcagaatgtccttctaacgtggatattgctcgttttaaggcagagttcttgcaacagcattatgatgtgtgcggggttccgatgaaggcttttttgattgcccgtttgacagaaattcagcgtttgggtacgatcttaccgtggttttataatgccgtcgttcgaaaccggatgacaggcgggatgttgaaacgaatgttgcattttgccccggagcgggcgattcctactctttataagaccacgttgaagcattggcttggtcgttatcggcgaaagaataggggtgagatcgtgggaagagtgtttctgtttgccgatgagtttaccaattacatggacgtggagatcgggataaagatgatcgaattgctggatcggttagggtatgaggttattataccgaaacacgtggaaagtggacggacagccatttcgaaaggtatgttgaaggtggcgaaaggggtggcccggaagaatgtactgttgttgaaaagctgggttacagaaaatattccattggtaggtattgagccttcgtgtatattatcgttccgggatgaatatccggatttggtaggagatgatttgaaggaagaggccctgaggttaggaaaaaattgcttgttgtatgacgagttttttacccgggagattcgtgccggaagaatacgggcagaacaatttactgatcaaccgttgaagattatgttgcatgggcattgtcaccaaaagtcgttggcctccgttgagccttctagagaaatgttatctttgccagtgaattatagcgtggaggttattccttccggatgttgtgggatggcgggagctttcgggtacgagaaaaaacattacgagctgtccatgaaaatcggggaacaagtgttgtttccagctgtgagggatgctggggaggatgtttgtatttcagccccgggaacgagttgccgacgacaaataaaagatggtacggggaaacaggcattgcatccgatagaagttttgtacgaggcattgaaatgtacgaaggaaaaataacttcgaatttcgtccttctttcgtttgatgtaaagtattaatgttatatttttgaagttcaaatttttaatttgacaaaaaggtagatgtg

SEQ ID NO: 241 - DNA, 6621 bp, Butyricimonas faecihominis
atctaacgcaccaatgttacaatttgctaaattaattataaattcttttaacccgagttaatgtcctgactttaactttttattaacgtatcacaccttgttatttaaatcaagtccaaatagctttacacacgcttaaaatgattaaaaatatgaacaacatggataaaaaacaggccctgcattaccatgcaatgggacgtcccggaaagattgaagtcgttccgacaaaaccacatagtacacaatatgatctttcactggcctattccccaggggtagcggaaccctgcttggaaatccagaagaatcaaattgatgcctacaaatatacagccaagagcaacttggtagccgtgatttcaaacgggacagccgtactcggactaggagatattggtgccttgtccggcaaacccgtcatggaagggaaaggattattgtttaaaatattcgcggacatcgacgtgtttgacatcgaactcgacacgaaagacgtggataaattcatcgaaacggttaaaatgatctccccgactttcgggggaataaatctggaagatattaaagcacccgaatgtttcgaaatcgaacaccggctcaaagaagaactggatattcccgtgatgcacgatgaccaacacgggacagccattatttcggctgccgggttactaaatgccctcgaactcaacgggaaaaaaattgatactattcgtgtcgtagtcaacggagccggagccgcagccatttcctgcgcccgcctttataaagcattgggagtgaagaaagagaacatgatcatgtgcgacagcaaaggagttatctacacgggaagagccggcctcaacgcggagaaagaagaatttgccgttaagacctctgcccgtacactaaccgaagctctcgttggggccgatatgtttttaggtctctctgtcgctgatatattgagcgaagagatgattcaaagcatggcaaaagacccgatcgtatttgccctcgccaacccgaacccggaaatcagctatgaaaaagccattcacagccgaccggacatcattttcgccacgggacgttcggactacccaaaccagatcaacaatgtactcggattcccgtatatcttccggggagccttggatgtgcaagcccggagcataaacgaggagatgaagcttgccgccacttacgcgctggctgaattgacgaaagaacccgttcccgaaaacgtgaaaatggcatacaatgacccatctatcgctttcggcaggaattacatcattcccaaacccttggacacccgtttaatcagtcgtatcgcccccgccgtggcaaaagccgccatcgaatcgggagttgcccgcacgggaatcgaggactgggatgcctaccgggatcaactggaaaaacgcatgggccaagacgaacgactcatgcgccgaatgacccgtaaagccaaaaccaaccccaaacgaatcgtgtttgcggaaggagctgacatcaaaactctgatggccgtacaggagattctttccgaaaagatcgctcatcccatactcatcggcaacaaaaccgagatcgaggctctccaaaaacaatataaattagagttacccgaactaaccattttcgacccggcaaaagagatcgacaaaatagatcaatacacccagtcttattacgggaaaagacaaagaaaaggggttattctggaacaagccaaagaattgatgaagaacccgaatttcatcggtttaatgatggttgaatccggagaggcagacggtttcatttccgggattcactctaattaccacgatgtactccgggctgccaaagacatcatcggcctaagagcttgttgtaaatatgccgtgggtatgcacatcgtgaccaataaaaaaggtacttatttcctagccgacacgacagtcaacagtcatccgtcagccgacacgctggaatgcgtgaccgtcctgacctacgaggctgtaaaacaattcaacgtggaaccggttgtcgcccttacctcatactccaatttcggggaataccgcttgggtagtccggcacagatacaagaggccgttgacacactccatcgtaaataccccgaaatcctagttgacggcgaaatgtccgcatccattgcgttcaataccgaattgcgacaagcacgtttcccgttctccccactggcagacaaggacgtgaacacgattatcttcccgaaccttagttccggaagtatagccttgggcgtgttacaagaactaggaaacaacgaaatcatcggtcccgttctactcggtttgaataaacccgtacatattttacaaatgggatgtagcgtgagagacattgtttacatgaccaccttggccgtgacggacgcacagaaagaaatgccggtggatatgtgccgaatctgacgatttacgattttagatttacgatttatgattctagctttcgtaatcataaatcgtaaatctaaaattgtaaattatttcaccggaatcttctccacccttctctggtggcgacctccttcaaaatccgttgataagaaaacgtctacaacattttgagcttcttcgtaagcgatgaaacgagcaggtaatccaaccacattcgcattattatgctgacgagccaaagcagcaagctccatgttccaacacaaagcacagcgaataccctgatgcttattggcagtcatagaaatgccgttaccacttccgcaaatggcaattcctctttcatactcgccagtctccacggccgcagccatcggatgagccgaatccggataatccatactctcggctgaataagcaccgaaatcctttacttcatgacctttttcccgaaggtattttaccaaccgttccttgtattcgtaaccggcgtggtcacatgctatcgctattttcatctctttaaaattattgtccttaactataaaacaaaagttgactcgttatcgtttgcaagtttacatagaaactttttaacttgcaacttgaaacctgtcaacttctaacaaaaaagggactcttccgaatcccctttttatcatcaaagaatcaatttatacccttttccgtgaacattgataatctccactgacggatctttcttcaaatgtttacgtaacttcgtgatataaacatccatacttctggcattaaagtaattgtcatcagcccagatattcttcaaagcgtagtttctctccaataccttgtttacattcaagcacaacagacgaagtaactcagactctttcgtggtcaatttttgttcttcttccccgtcaaacaaggtctgcttcttagaattgaatgttaacttaccaatcttgaagatctcttgttcgtcttccggtttcaacccggttgatcttctcaagacagcctcgatacgcagcaacaactcttccatactgaaaggtttgctcatataatcatcggctcctaacttgaatccttccaacacatcttctttcatcgacttagccgtcaagaaaataatcggaatttcgctattgatctgtctaacttcttttgcaagcgtaaaaccatcttttttaggcatcatcacgtcgaaaatgcaaatatcaaacggttcgttcaaaaacctttcgtatgcaatctctccatcctcacacaaaacggtgtcaaaacctttagctctcaaatattctttaagaagcatacccaagttggtatcatcctctgccaataaaattttaattttctcatccatagctatgttgttttaaataattctcattttttaattctctgtaaaaatatacgaatttagaaaaataaggttctctttattttttgcttttttacggttaaaggtaaaatgatgtcaaaacagctacctttttcaagggagctttccacgtcaatccttccaccatgagcctcaacgattttcttcacatatgatagtcccaagccgaatcccttcacgtcatgcaaattccccgtggacacacgatagaatctttcgaagatcaacttctgatctttcttagcaattcctatgccattatcaatgacacttattataatttctttatctttattacgagtataaatggtaatttctggtggttttacacaatattttatcgcgttatccacgagattggaaatcacgtttgtcacatgcacctcatccgcaagcacttcatcttgatccgcctcaagataagcagagaacttacctcctttatcctccacacgtaagctaaatttaggtaataaatcttcaatcaactgattaatatttatattctttagctttaatttcatccgagtctccgtgaacaaagccgtttgcaacacccgctccacttggaaagttaaacgcttactctcatcccggataatcgtagccacccggtcaatggtttccggggtattcgtcaccgccccgtctttcaacatctgcgatgccaaagaaattgtcgcaatcggggttttgaactcgtgcgtcatattattaataaagtcattcttgatcaccgacaactttttttgccggacgataacgatcaaacagaacacggcacaaaacacgatagcaatcgtgatcagcaccccgggcagaaccatccacacggaacctgccgtatcggacgatgcatccgggaacttcagatacaggatagccgatgagctttcacccgggaatatcttccggctaagcgtcacatcatccgagacatgacttaaaaaattcttggaggtcagaataaatttaccattttccttgataccgaattcgaaacgggaacgaattcccgcatctgtcagcgtgttaccgataaaaccgtatagattattcaaatccacccgcccctcgatcacgtgtttatcctctttcccttccggtacaaacctgtaattttctccggttcgttccttcatggcttgctgcaacttggagatagaagtggccaaattatcttccttgaacttacttcccacgaattcactgacatccttcacctccgaatcatcatcaatcaaattaagcatagaattggcaactgctgacgggtcatttttcacggcaatcggacgtttcgggtcaatataaatcggggcatcaatctccactccccgacttctggcctcagacagattcctgttctcagaaagccttcccgcctcttcctgcttgcggatataatcgaccatatcatccatggcccggttagccgagtagaagaattgctccttcttcacctcgtaagccgtttggaaataactggtctggagaataatcaatcccagcaaggatataccaaacacaattcctaatatgattatctgttgctttctcatacacgcaaatttaacaaatccattttaacaattgacaggcttaatactatttaacaaaaatataactcgttgatcctcttcaaaattttatccaatccgcaaattaaacaagtcaaaactccgctttcacccacttttaacgttaataaaacttttgaatttattattttatccaacacttcccgctttcccaaccctccggaattagctagaataacgtggcttgccagtcatccgttcgtcgattcttccgcagatgcttgtaggccaaatccgtcacttcacgtccccggggagttcttttcagaaaaccttccttaatcaagaacggctcgtaaacctcttccaaggttcccgggtcctcgctgaccgcggttgcaatcgtggtcaaaccgacaggcccccctttgaacttatcaataatcgtcaacagaattttattatccatatcatccagtccgaacttatcaatattcaaagcctccagcgcgaaggtcgtgatctcaagatcaaccaccccgtttcccttcaccatggcaaaatcccgtacccgacgcaacaaggcattagcgatacgaggagtcccgcgacttctggacgcgatctctttcgaagcctgactcgtaatctttgttcttaaaatagctgccgagcgctccacgatccccgtcagcacgtcgagatcataatactccaaatggctattgataccgaaacgcgccctcaacggggctgtcagtaagccgctacgcgtggttgccccgatcagcgtgaaaggactcaattggatctgcacggatcgggcagccggccctttatctatcataatatcaatcttgaaatcctccatcgccgagtaaagatactcttctacgatcgggcttaaccggtgaatctcgtcaataaacaacacatcattcggctccagattagttaacaaccccgctaaatcacccggtttatccaacaccggacccgaagtaatcttaatcccgactcccaactcgttagcaataatagccgacaaagttgtctttcccaatccgggagggccgtgcaacaaaacgtgatccagagattcaccccgcatcttcgccgcctccacgaagacttccagattatccacgatcttcttttgcccccggaaatcactaaaactcaacggacgcaaagccttctccagttctttctcactatctggcacattcccggtccttatatcaaaattacccatgtactattttat

SEQ ID NO: 242 - DNA, 6612 bp, Butyricimonas faecihominis
atatataggttttaagaatcaaacccacggttcagtatatgaacttcccgagtccgctgattatcgtgagcttattaccttttccctcatcgttatcgtagcaacgaccgacgatttgggcatcgatgttaaagcttttggaaatggtgatgatgtcatctgcaatctcttcatccacgtagatttccatacggtgacccatgttgaataccttgtacatttcgtcccacggggttcccgattgttcctgaattaatttgaacaagggaggaactgggaacatattgtccttcacgatgtgcatattctccacgaaattcatcactttggtttgggctccaccggagcagtgtaccataccgtgaacttgtttccggtacttgtcaagcacctgcttgattaccgggatatacgtacgggtcggagacaataccagtttcccggcatcaatgcccaatccggcaatttcgtctgtcagtttacattttccggagtaaacgagttcttccggaacggagttgtcatagctttccgggtatttcttcgccaaatacttggcaaatacgtcgtgacgggcagaagttagtccgttggaccccatcccaccgttgtattctgtttcgtaagaggcttgcccgtatgacgaaagtcctacaattacatctcccgccttgatacggtcgttagagatcacgtccgaacgtttcatccggcaagtcaccgtggagtccacgataatggtcctcacaagatcccccacgtctgcggtttcgcctccggtagaataaatgtttactcccagtttccggtattcctcgatcagctcttccgttccgttgatgatggctgcgataacttctcccggtatcagtttcttgtttctcccgatcgtggaagagagcaggatattatccacggcacccacgcagagcaagtcatcgatgttcatgatcaaggcgtcctgcgcgatacctttccacacggataagtccccggtttctttccagtacatgtaggcgagtgaagatttggttccggccccgtcggcgtgcatgatgttgcagtagcttttctgtcctccgaggtaatcggggatgattttgcagaaagctttcgggaaaatacctttgtcgatattttttatggcgttatgcacatcttctttggatgcggacactcctcgctggttatatctttcgtcttttctcatggcaattgaaaattgaaaattgaaagttgaaaatgaaatgttttcatgaatttctcattttcaagaattcaaattttcctaatactaattctatttatctgttcgcaaaggtagatataattttcaattttcaattttcaattttcaattaattgctcgtttatccagcaattccatgaaacgttccttgtaagaatcggaaatagggatgtagagtttcccgaacacgattcggttccgttcgatggttttaattttgttgatattgacaatataggaacggtgtacccggatgaatatatcaccgggaagatggtcttcgatacttttcatgctcatcagcgtgagaataccgccctccttgtcctcggtttggatacgaatgtaatcttttagtccttcgatgtaaagaatatccttcaacaggatttggatcaatttgtaatcgcttttcacgaaaatggaatccggcacgttggcggaaacgttttccgcccggctcatttcgatccaacgtaaggcttttgtggcagcccggagaaattccgtgtagttgaacggtttcagcaggtagtctagcgcgtcaacccgaaagccttccagcgcatattgttcgaaagcggtggtaaagatgattttcactttgttgcccacgagacgggatagttccaacccgttgagttcgggcatctgaatatccagaaaaaccaaatctatcggttcttcctctataacggaaagcgctttcactgcactatcacattgtgcgatcaggtgtaggaacggtgtccggctcacgtagctctctagcaaatccaaggctaacggttcatcatccacgatgaggcagttcagagtcatgtcctttaattttaaagttgaataagcaattccgtgataaatcggttgttaaggttttcagccttaaagatatattttccgggatagagtaactccagacggcgttttaagttggttaacccgataccggagccactccggtcgttgtcttttttaggatagttactgttttccacgagacagttgatccggttattcccctgcaattcgaacttaatgtttataaatgattcctgcgtgctactgaccccgtgtttgaacgcgttttcgatcagcgggataaacaagagcggggcgatcatgattccgttgcctctttccgggatggaaacttccagccgtgtgcttttaggtaagcggagactcattagttcgatatagcttttcatgaactcgaattctttatctaccgacacgaaatgttggttgttctcgtatagcacgtgacggagcatacgactgagatcatggacggcatactgggccttgtcctggttgatagcgatgagcgagtagatattgttcaaggtattgaataagaagtgcgggttcaactggcttttcaagttttgaagttccgcctcggcctgagctttttttagttcttgtttctcgttctcggtttcataccatcccccggtcattttgattgccacgctgagggcgacggtcaatgccatgagcatcatgtcccgggcgataaacacgtaccgaggcggtttaggtaaggactcttgtaactcttttaatgctttcggaacgggttcagataaatgtttccggtgaaagtcctgccagaaatgaaggctagctcccaggagcatcacgagaacgatgttacttagaataaatgttgatacttttctgcggaaaagctgccgttcgatcagccagagaaaattcgtgtagaatatgatcaggcaacttaacgggacgaaacaatatcccaaatatctgttcagggtaattgaaacaccttctccgcgatagaagaaaaagggaagggcaaagaatattccccatccaagcacgtggatggctcccgttaatatcttcttgttccgtgtcttttgcattatatcgtctttctccacttgcaaaggtataaaaaaagttacaagttacagggttgcaagttacaagtttatggaagaagttctgtcgaaccggtaacttaaaaacttgcaacctgtaactgccgggttccccggcaatctattcgtatcgtatagcatcgattgggtttaactgggatgccttttgtgccggataccagccaaagaatattccggtaaccgtgcagaccaggaaggaaagcacgacagaatacatctggatgtatatgggccagccgatagcgtatttaataataagtgatgaaccgattccaagaactaccccgataatacctcccgtgacgctgataatgaccgcctcgataaggaattggaataggatgtgtcgtccttttgccccgatggacatgcgaaggccgatttcccgggttcgttcggtgacggatacatacatgatgttcatgattccgattccgccgacaagtaaggatattccggcgatacaggccaacaggacggtcatcaagtcggttgtcgtactcatcatggagctgagttcttcttgcgagcgcacgtggaaatcgtcttcatctccagtagctattttatggttttggcgcaaaatggcggatatttcctcgatagcctcttccgaatcgtcttccgtgacggccgaggcgaatattccttgaatgtaggtgatggccaacagacgtttctgtatagtggtatagggggcgataatcatatcatcctggtcctgtcccatggagttatatcctttgggagtcaataccccgatgatgcggaagggggttttgttgaaccggatggtctttcccagtggttcttctcccttcgtgaataggttatcgacgacggtttgtcccacgatacatacttttgcggaagttttgatgtcgtgatccgtgaacatctcaccttcccccacgctgaatttccggatgtcaagataatcctggtttactccgtagatggttgtcggggcattattggctccgtatataacctgaccgcttgaattcacggaaggggtacatttgtcgatcaagtccacgtcacgaacgatcgcctcgtaatcttccagtttcagcgtttgcatgctgctggcactttgacggactcccccgaacttcccgtttccgggatggatcatgatcatgttggaacccatctctgatatttggtcacgaatgctacgttttgaaccttgcccgatagccagcatggaaatcacggaccccaccccgataatgattcctaacatggttaagaatccccggaatttgttgtttgccaaggctcgtaaagcaattcgtattaaatttgcgtagttcatgtgttaattttagatttatgatcctattaatttcttgatttatgattttagatcctatcgattaagtgatttaatgattttcgatgaagtgattttaatcacccaatcatcgaatcggcaatcacgaaatctttttcattctaaactctgaatttttaatcgttctcctttggtagtgcgtccaatacttctttggccgatgctacattctggttaatcgtgtcttccgtgatgtggccatcccgtaggactatgttgcgactgctgaactgggcgatttcgggattatgagtcacgaatataatggttcttccttccgcgtgaaggcgttgaaaaagcgtgaggatctcgaatgaggttcgggtatccaggtttcccgttgcctcgtcggccagcaggatcaccgggtcgttcacgatagctcgcgcgatagctacgcgttgttgctgtccgccggacatttggttggaacgatggttgatccgatcactcagtcccactgcattcaaggcattcatggctttctcccgacgttcgcgagaagaaaaggccgggttgtaaagtaacggtaattccacgttctccaaggcggtcgttttgggtaacaggttgtaggactggaacacgaaaccaatcttgcgatttctcaatgtggcccggtcattttttcccatgtctctgaccgcgataccatcgaggtaatagtcccctgaggtgggagtgtcaagacatccgaggatattgagcagggtggatttcccggaaccactcgtacccattatcgtcacgaactctccggcacggatcgagaatgatataccgcgcaaagcatgaacggtttccgatcccaccttaaaatccctcctcaggttttctatttttataatatcatttgtcatgagttcaatcttatacggtaactattttttcttttgtcccggacgtggcggcatgaacgggttggattcctcgctgcctccttggggtgccacgttcttactgcgttggattcccacgatcaaacgagcgccttccggtagaccgtctttcacttccgagtatattccgtcgctgactccaactttgattactttaggaacgataccttctgccgtttgtaaccaaacgactttttcacctcttcccgcttgcggggtttgtgcggtttgcgggtcttccgggttggtctccggggtaaagcggaaagctttcaacggggccagtagaatgttgtccttctccatcgtgtagaccgtgatgttggcggttagtcccggtttcagtttcagttccggattcggggcatcaataaccacctcgtaagtgaccacgttggattctgttgtcgggtttagacgaacttgagtcacgtcgccctcgaacgtgtcatccggaaaagcgtcaaccgtgaacgtcacgcgttgtccttcgagtacctgaccgatgtcagcctcgtccacgtcagcgatcacttgcatcttgcgcaaatcgttagcgatggtgaacatggtcggggtttcgaaactagcggcaactgtttgtccctcttccacttctctggatagaacaaccccgtcaatcggtgaggtgatcgttgcgtaatcgaggtttgattgagcctttaccatcgtggcttgtgctttctcgtaagcttgttgtgctttctcgtattgatataatgcttcctcgtattctgtttcactaatcaaatttttttcgtgtaactggcgcaggcgcttgaagtttttatcttggtactcgaattcgcttttgcttgatttcaggtttgccatttccgattttaactcggcttccagtagtttcctgtcgagttcggcaagtaattgtccttttgtcacgacggaattgtagtccacgtagatgtgtgaaatcgttccggatacctgcgtacccacgtccaccttggtaatcggttctatcgttcccgtggcggtcaccgtgttattgatggatcctttttttagttcgacagtctcgtatgtcgtcacttttttatctcccgaacggaagaagaaaaaggccccgacaataacggctatgacgatgattatggtaacaatctttttcatgttgttctataatta

SEQ ID NO: 243 - DNA, 6586 bp, Butyricimonas faecihominis
agcgaggaattgcctatccttttgcccggagtatggaggcaggactttcgtttaatttttaaagatgaatggttatgaaattatggaatatcatttggatcggggttgtactcgtgtgtggtgtaggatgttcggattttctggatgttcagcccaaggataaacagtctgaggaacagttgttttcgacgagaggcggattctacacggcggtaaacgggatatataacaaggtggcctccacggctctttacgggaaaaatctttcttacgagttggtggacgtgatctcgaaacggtacgcaccgttgcaatcaaacacgtacttgacagcgttgagtaccttcgattacacggaggcttcggtgcagaccgggttatcgaacacgtggactgaggcttacaacacgatattgaattgtaacgtggtgttggataatcttgaaaagagcgatggcgtgttgttgcctgctgaataccggatgttgaaaggagaaatgctggctctccgagccttcttgcattttgatatgttacgtttgttcggtccggtttacaaacttcatccggagatggagtcgatcccttacaacgagtcatcgagagtatcagccttgccgttgttgacggctgattctgtactacatgagaagattctgcgggatttggatgaggctgagcgtatgctggtggatagcgaccccgtgattgaaggcgggcggatggcttcgcaggagggggatgaggatgtgtatttgcgttatcgccagttgcggatgaattattatgccgtgctggcattgaaggcgagggtgtacctgtacgcgggagaagaggcgaaagctttggccgtggctcgtgaattactgaccgattcgaaagtggatgaatatttcccggctgttgatcccaataaacttctggcgaatcaggataacccggatcgggtgttctcgacagaagtgttggccggaatctatgtgaaagatcgggccgatattcatactacttatttcagttcagaacaggcgggaacgaattacctgcacccccggaagaattacgtgaatgcgaaccttttcgcggaagaaacgcaggattatcgttttcaatcgtgctggcgtacagcttctaacgagaacgaaggaggatatgactttatcaaatacgaggagattgctaaacctactcaagcgggagagaccgagtatttttatgccgttttcatgtcgttgatccggttgagcgaggtgtattatatcgcggccgagtgtgaacccgtgctggcagataaatacgagtggttgaataaaatgcgggagcgccgaggtttgagtgctttaaccgtggtttcggatgaggatttcatgaagcgtttgcgtatggaatatttgcgggagttcatgggtgaaggacagatattcttcatgtacaaacggttgtatgcccatctcctcagcgatgagaacgggaatgatgcaaatgcttatgaagctcgggaagagcgttacgtgttgccgttaccttccggggaaatcgctaatcgttaaatagtaaggttatgaaatggaaaataatattgtttgttttaagcttgaatattgcttttagtgcttgtgaaaagaaagatatttcggtgttctccacggatgataccgggatttattttcaaatgataagagggtattacgggacgaatacggaagtgtatatcgattcactggacttttctttcgcttcggttcaggcttctataagagacgtgattcttaacgccacggttcggacaatgggaaaggtggccgatcatgaccgtcctttcaaggtggttgtggataaagaaggaacgactgccatggagggagtgcattacgagattgacgtggacacggtggtgattcccgccggggaaagcacggcgtatgtcaacgtgcgtttcttccggacagatgatttaatggaaaaatcggtccgtctggctcttcgtttggaagataacgagtatttcaagtgttatttcccggaatataagaacatgaatacctacacgaccacgggcgtgcagattcacggggattcattctctttcacgttgagtgaaatgtacacgattccttggtattggagggtgattattgaaaccgattatttcggggagtggacgcctaaaaagtttgtagttattaatatggtttgtggttttacgatggctgattgggatcgagcaggggggaccggggctaaaataatatacgggcgttgtggctttttcgcgacgatggttcaaaagtatttacagggacaggcggacgctggaactccggtgctggactcggatggaaaatatatgcagcttgacccggattacgcggtagattattcccggtatgaataatattaaaaagtgatgttatgaaaataaagtgtattatattgtttttgtttggcgtatccctttgtgcttgttttgatgataaggggaactatgattaccgtgatatggcggatataacgatagagaatgtcccggaggtgatcgaggtgttgggaaattccgatcatatcgttataactcctaaaattatttcttctttggatggagaggtgaaggaggataatggcaatttcgagttctcgtataagatcgagaagaaatccggggggacgatggttgccgggcagaagtgggtggatttgaatccttcgaaaaccttaaatttggacacgttggccgctttcgcagccgacacgtatatcgggtggtttgccgtgacagataaacgttcgggggtgcagacgtcgaccacttttgatattaaagtgtcttccccgacttacgagggatggatggtgttgtgtaacgagggtgaacaggaacgggtgcgtatggatatgatttctgtgatctctgcggaacgggttattccggcatatgatgtgttggcacccttgggattcccggaggtgaaacacgcgagagggatcggtttctatccaacccgtctggcgaatccggatgacgtgatctacgtgatgtcggaagagggaacgtataaattgaacaaggaaacgttcaagacagatgaatcttggaatatgaataacgtggatttcattattcccccgaccgatgagcatgtcgtgtattataacacggtgaatagtagtaatgcctcggctgcattggcctgtctttgcgtaacggatgccgggaatgcctacgcgcaggtgttgaatactcccggtgcggctttcgaaaaaccgataaatacttccgcccggggagaagccccgacttaccgggttgccccgtatatcggggtgagcatggctcgtcccggaaatggaaaagcggctattttttatgatgtggataaccagcgttttatgggttggaaacaggggtatgtagattttttgatgcaggtgttgaatcctatccgggataaagatggggctttgtttacatttaaaacgggaatggacttggtgtacatggagagtacccgttattccaacggattggtatacgcgatcttgcaggatgctgcggggaaacgttgtatttacggtatcaatatgtctggtaacgggtatgttccggaatcgaagtacgaggatttgaatgctcccgattttgataaggcgacgctctttgcattccattctcagttcccttatatgttttatgccgtggggaacaaggtgtatttgcataacttgggaacaaacacgacttacccggtgaataatattgttttaggggaaaacgagacggttacgatgttgaaatttaacctgtacaggcaatgttcattgaaagatctgaacaaccagtcggaggaatttatggcccggcagtatgaactgatggtaggctcttataatgctgcgacaccggataacaatggtggtagattgggattttacccggtggatggggtgaataacagcgtgacgaaaaggatcgagtatagcggttttgcgaagattcgggatgtggtgtatcgtgaacgacggtaagtagtagtaaatcaaaatgtagcaataagtccgggattatcccggacttattttttatcgtgacttatttgtcctacatttgcacccgctaattgcatttggtatgcaatatattgtaaaacagatcacggggagccgtgattcttaaagtgcgagaacgataaatgaaagagttggatttgacacaaggccgggtgccaaaggtattacttcagtttgccgtcccgtttttaattgcgaatgttcttcaagcgttatatggtggtgcggatttatttgtcgtgggacaatatgacgatgcggccagtgttgccgcagttgctatcggtagtcaggtgatgcagaccatcacgggaatcattcttgggctcacgacggggacgacggtgttaatcgctattgccacgggagcgagggacgatcggcaggtggcctcgacaatcggttcatctatttggttatttgccttgttgggtatatcgcttacattggttatgactctgtgtcatggttcgatagcctcgctaatgcatacacccgtggaggcgatgcgtgacacgaaacattacattttgatctgttccattggaattcctttcatcatggggtataacgtcatttgtggtattctccgcggactgggcgattccaaaacacctctctatttcgtgggattagcctgcgtgattaatatcgtgcttgatttcatcttggtcgggtattgtggtatgcgggcggcgggggctgccatagcgaccatctcgtcacagggaatcagtttcgccacggcgttatggttcctctaccggaaaggctttcgtttcgagttctcgagacatgatattcgcttggatcgtattctttcgaaaaagatcgtgaccttgggggctcccattgctttgcaagatgctttgattaatgtctcctttctcttgatcactgtaatcgtgaaccagatgggagtgatcgcgtcggcctccttgggtgtcgtggagaaaatcattgtatttgccatgttacccccgatggccatatcctcggcggtagccacgatgacggcacagaattacggggcgaaattaatctctcgtatgaatcgttgtctttattcgggtatcgggatggcattggtcttcgggctatcggtttgcatttactcgcaattcctgccggaaaccttgacgggaatattcacgaacgatccggcggttgttgccgtggcggcggaatatttgcgtggttatagtatcgactgtgtactggtgagtttcgtgttctgtatcaactcctactttagcggacagggaaactccgtgttcccgatgattcacagcatgatcgccacctttttggtgcgaatccccctttcgtatctattcagtctgatcgacccgtcttccttgtttatcatgggattcgccccacccatttcgactttcgtgtccttgctgatttgcatttggtatatgcgatacacccgaaacaaaaatcgaatggcggtaaacgtggcgacttcgtgttaatcaagcggaaaatgaacatggccttgtgtataataattaaaatgtagatagatgatgagagtaatatctgtacgggaaaacccggaatataaagaggtcgccataaaatatttccccagcaagtggacggaagtagccccggaaatatacgaggattgtatcactcatgccgtggggagtgaggatgttttgccacaatggtatctgttggaaaaagaggggggtatcatgggatgtgccggcttgatcacgaatgattttatcagccggatggatttatacccttggctttgtgccttgtatatcgaggaggcgtatcggggaaatgcttatgccgtgttgttgattgaaaaagcgaaagaagatacccgtagggcgggattcagccgtatgtacctttcaacagaacacgtggggtattacgagaaatacgggttccgctatatcggaaagggataccatccgtggggcgagaactcccggatttacgagatcgaagtttgaacttctatttaaaatgtcacaccaatgaatggtacgaacgaaacgggtcggctaattgaaaaatatcttccggtggattaccatgacacattttcggtacaaaccgacgtgaacgggttatctccggcggagatcattacaagaatattctcgtataatcccgcatggctccgggctttatacaaattccgggcctttctcgtgaaacctttcgggatcgaaacgaaaactccacgggtaaagaacttgatcgtggaggaaaatgaacgggaggcgatcatgcgtaaggatgatagtcatttacttttttacgtttcggtatttatttgcccggaagaaggaggcaggcagaccacggaaatctccacatgggtgaaatatcacaaccggataggtcggatctatttcttctttatcaagtcgttccatcgggtgattgtcccacgggtctcgaaacgggtattaataaaagagtgatgttcctctattttggatctctttacaaaatgtgttaatgataaataatatggtagata

SEQ ID NO: 244 - DNA, 6560 bp, Butyricimonas faecihominis
gagtatagattaatctaatattatggcaatggtactatgcctaaaaagaaagaaaaagataccaaaaaacggctatattgtgattgtttttttggtatctttttaactttattctaccgtcacggatttagccaagtttctcggcatatccacgttgcagcctcgcattacggcaatgtgataggagatgagctgtaatggaatcacgttcagaagtggggaaagatattccagtgtttcaggaatttcgatcacgtgttccgccagttttttcacctgtgcgtcgttatcattgacaagagcgatcacgtgtcctttccgggactggatctctttgatgttggaaacgatcttgtcgtaatagttgtcattcgtggcgatggcaaaaaccggcatattctcgtcgatcaaggcgatcggaccgtgtttcatctctgctgccgggtaaccttccgcgtggatgtaagaaatctctttcagttttagcgcaccttctagggcaaccgggaattgacaacctcttccaaggtaaatggcgttcgtggagtccttgtaaatggccgctatctccttgatcttgtcattcttttccagaatcgctttcaccttgtccggtaagttatacagttcgttgatatattttttgtacagttcgtcggataatgttcccttgcggtggccgatctgtaaggccatcatggccaacacggatatttgagccgtgaatgctttcgtggaggcaaccccgatttccggacccgcgtgagtgtacaccccagcatcggtttcccgggcgatacttgatcccacgacattacagatgccgataaccgtggccccgtgtgctttggcatacttgatggctgccagcgtgtcggccgtttcaccactttgtgaaatggcgataacaatgtcgttggcgtccacgatcgggttccggtatctgaattccgatgcgtattccacttctaccgggattcgggtgaattcttccaagatgtattcgcctaccgttccggcgtgccatgacgtaccgcaaccgataatgataatgcggtgggcgttgaccatcttcgggataatttcggagatacctcccagatagatttccgatgcctcggcatttacgcgtccgcggatcgtgtcgtatattgaatttacctgttcaaaaatttctttcagcatgaaatgcgggaaaccgcctttctcgattttctcgatgtcgatgtccacttgctgaatgcttaatgaaacaggggtgtttttgatcgttttcaggatcatttcgtccctcttcaagatggcaacatcgtcatcgtttaagtagatcacgtttttcgtgtattccacgataggtgttgcatccgaggccacgaaatattcgctttgacccacgccgatcacgagcgggctaccttttcttgccaccacaagctggtccggttcgttcttgcataaaacaaccagtccataggccccgataactttggtcaaagcgagacgcacggcattctccgcgttgacttggcctttcgtgtaaatgtactcgatcaggtttgctagtacttccgtgtcggtttcactttggaatgaatagcctctggcctgtaatttttcctttaataaagcgtgattctcgataattccgttgtgaacgatagagaaaagaccgttcatagaagtatgggggtgagcgttcgcgtcatttggttccccgtgggtagcccagcgagtatgtcccataccgatcgttgcgctggtgtcttccagttccatgtgatgttccaggtcttgcacccttcccttgcacttgtaaacttggatgttattattatggatcaacgcgattccggcagagtcatatccccggtattccagacgtttcagaccgttaattaagatcggacaggcttctttgggcccgatgtatcctacaataccacacataaatgttatgttttaatgatttatattaatgaaaacaagcggcataacaaccattgccgcttgtttatattgttattcaataatcttgtcgaaaaagtcggaataagcctcgatgtaactttgctcacccgggtattccaaggtaggtttcttcagatcggtggcaaaggtacggagttcatcgtccacgtctttgtggttgaaaatgattccgtcagcgtattggaatgccaatttattaatattcgtgtatgtcgggtcttttaaaagtgccacgtctttccgggcaaccccttccgtgatcgctttttccccgaatttttcatctagttttccctcaaatttgtcgttataagtagagaataccactttcgttttggagaaaacagggtcatcatgatattcttttttcaggtaaaggggaaccagcgctgtgaaccacccttggcagtagatcaggtcgggggcccatcttagtttgcgcacggtttcgaatactccccgggcgaagaaaatagatctttcgtcgttgtccgggaaaaagtttccttcttcgtcggagatcgtgtgcttacgttgaaaataatcctcgttgtcgatgaaataaacctgcattcgtgcagcttgaatcgaggcgaccttgatgattagcggatgatccgtgtcgttgatgatcaggttcattccagaaaggcgaattacctcgtgaagttgattccgtctttcattgatgcagccgtaacggggcatgaatgttctaatctctttacctttgtcttgtatcccttgaggtagaaatcttccaatatttgccatttctgattccggcagataaggaactatctcttgagaaatgaataaaactctttttttagccataactactacttttcccaaaaaccatacaaagataggcattttggttcagatttcaaaactactttggaataaacctctctcgaaataaaccacttgaatcttaaaaacgatgcggggtataggatttttgactaaaaaattttgcttttatgatagatttatataacattgcgaaactctttttaggctgtaaattaggggaagactgtactatggcgtggcataataaactgggcgaatacggggaagaaaaggtgaaccggtatcttttggatatggggtatacggttttggagagaaactggcgggtgggacatcgggaattggatttcgtgtgtcttgacggggaggtgctggtcgtggtggaggtgaaaacccgggcagatgacaatgtgtcactttttgatttgctggattacagaaaaaagaggaatctacaagctgcgggtgccgcttatctaacgaaaaagaacattcatcgggaaatacgattcgatttggttgtggttaccggggcctcgatgtgtctagaatacattaaagaagctatcgatttgttttaaagaaccgggtggcttttgtcgtgtgtgtggtgtggtaggaatatgaaaagccacccggcataagaaaagtgtcaatagggatatttgtgtattatcaaaaattgtgctagaaattcggatttccggaaaaaatatcaaattttctttcggatggatgattttgtgtgaaatttactatctttgaaaaataaaacataaaagaaaaaaggatatggcaacagtaaaagcaaaatatttaggagatttgcgtttggagtgtacgcatttgcagagtggtacaaagattatcacggatgcaccgacagataataacgggaaaggtgaggctttctctccaaccgacttgtgttccacgtcattggccgcttgtgccatgacaatcatgggaatttatgctaaaaataacggtattgatttgacgggagccgagatcgagattaccaagaagatggcggcagaacctcgtcgtattgccgagatagacgtgatctttaacatgccggccaacggttattccgagaaggagaaaaagattctcgaacgtgtggcacatacttgccccgtgcatttgagtttacacccggatgtgaaacaaaatttcgtgtttaattggcagtaatggtcaccggggctaccggtttactgggtagccatttgttgtgtcatttggcacgatgcggtgagacgatcatcgcgctaaaaagagataagagccacgttgaagagacgatggctctcttttcgtgttattttgattcaccggaagatgccatatcccgggtgacttgggtggttggggatgtgttggatggggaatctgtggccccgtttgtggaaaaagtggatactgtttatcattgtgcggccatggtttctttcaatggcagcgatcggaatactttgctggaaacgaatatcaaggggacggaaaatatttgtaagatttgtttggaacgtggggtacgcctgtgtttcgtgagttcgattgccgctttgggggacgctcccaacgagagcgtcgtgattgacgagaatacaccggagattccgggatcggtccactcgctttattccggcagtaaaggggaggctgagaaaattgtctggaagtatgtccgtcaaggactggatgttgtgatcgtgaacccggctattattttgggggcggggttacggggacgaagtagtgtcaagttgtttgaacaggcgagtaaggggatgcctttctacacggaaggcgtgaatggatacgtggatgtgcgggatgtctgcgagttgatgattcgtttggcgaaagacagtgctattcggggagagcgtttcgtgttatgtgggggaaattattcttatcgggagttgtttaccgtgattgcccgtgtcgtgggcaagcgcccgcctcgtattcggatggcaccgtggatgacaggtttggcgtggcggttactggctttcgtggctctgttcacgggaaagaaaccggctttcacgaaggaaacggctcgctcgtctcaacataaatcccgttattccagcgcgaaggtgttgtctctttttcccgattttcattttcacacgcttgaagagacggctcgttttttcaaggatttgtgacgcgggttgcctaggtcgggattcatgaggtccggtaggggttttccctgtcccgaggctatcttctcgaaaatctccatttaaattagttcatttagaccacggagtattcatcctgcattcatgttgcattcatcttcgataaaataaatctttttgtcctttttatttggatttcggtaggttcgtgttgtatattcgtggtatgggaggatattttgctatgtagcttgatgattggggaatgtgtaattaataatagcgaggttatggagttagttgatagttcattattgaaaggtttttcgggagagattgacgggttgattgtttacacggttggggaaaaaacgtatgcccggaggaaaccggtgaatgtgcgtgatccacagactgagaaacaattgcggcagcgggccaagttccctgccgtgcaagcattttatcaatcagtcaaaagcgggattttaaaggaggtgtatgatttggcggcgaaagaagagggacgacgttccggttatcatttgttcatgcactttaatattgcggcctttggggagaatggttttattgattattcactgttacggttggcacacgggattcagcaattaccttattcgctggaaataaaggcggtgtcagaggatggggtggaattttcgtggttggataattcccttaccttgatggctcaagggtccgatcgcttgatggtgggtgctatttttgatgatgatccttttcaggttgtgatgcttggcgggatcacagcctgtcggaaggatggttgggctcccgtcaagttacccggtgggagttggaagacggctcatttatattgttttttcgggaccggggatcggaaacggttttcggcaagcaagtatttcaaaataaacaaatagtaaagtacatatggctatatttaattccattttgttccaccgggcgagaaagtccgtggggaacgtgaccttgtatgctttaaaggaacagaacgtggttcgggcgaaaggtatttatcgacgggaccgaaagtctttggctcaattgaaacaacgagcccggatgaaggcagtccgggaggtggggagccatttttatcacgtgttgccgcaaggcttttgttgctcttcgctaaaagaggggttgaattgtttcgtgaaggcaaacgtggggaaaatattcgtggatgacgagttgaaggtgagttatgatctcttgaaactggaaatttccggtggtacgttgatgccaccggttttatcagcaaaattagaggccggggagaaccgggtggtatttcggtgggagagacaacgattgatgccttacgcttttggtgatgatttgctttacggggtggtttcgcgaacggaagatcgggatggggaggtcattccattgggaactcggggtgcatccggggagttgagttgggatttacccgcgggttgggatgtttgcgatgtcgtggtacatggttttgccatgaatagcaaagggaaccgggcttctgtcagcgtgggattggcggtaggggacgaggtgtagttg

SEQ ID NO: 245 - DNA, 6545 bp, Butyricimonas faecihominis
ctataatagcagtatatgagcagtagaagaccagtagaagagcagtaaagaaagtagtgagaatatagagagagaataaagaaagagtaaagaagaataggggaaaagtacttttttcatttttggcatcgtactttttactacccatgctgtttgttatacaaaatgaatactcatgaataacaggcaccgcaaaattatacagctcatcgtgttgtacatggaaaacaaactttccgagacacaacaagacgagttaaccgcttggctggaagaagacgaaaagaatcgctctttctttcaacaggtcatttcccccgaaaagaggcttcaaaagtttgaaacccgaaaacacatcgattccgaaaaagcattttcaaaattcaaaaagaatacccaacctcataaagtaaagtctatttaccgtttaagccgatacgcggctatttttctcgtccccgtactcgtgggacttgtttatttacttgtgaatcaagagccaacaacccgtgaaatttcgcaatcacctatcactcatggaaacaacaaagcaattttgattctgtcacaagggaaaacgattgacttatcgccagatcacgcactacccctgctaccggaagggatcgatttagttttacaaggtgacaaactcatctatgtatcagactccacggcagaaaaggaaaaacaacattatgaactaataacaccccgtggcggggaattcaaaatcaccttaccggacggaacattcgtgcatctgaattcgaattccaaattaagattcccgaagaatttcgctcccgacaaacgagaaatattcctttcgggagaggcttatttcgaagtaagcaaagacacgaacaaaccttttctcgttatcgctgaagacgtccaagtaaaagtgtacggaaccacgttcaatataaacacattacttgggaatcaaatacaaaccacgctagtcaaaggctctgtcggaatccgggtgcaagattcatcgcaagagtatatcttgaaacccagccagcaagccatcgtgcaaaaaactgacgggaatatcatcatccgagaggtcgataccactccgtacacggcttggacagaaggcatattcctatttgacaacgaacgtctggaaaccattctggacaagcttgccctgtggtatgacgtggaactattttatcagaatgaatccgtaaaggatgtccgtttcacgggttacctgaaacgatatgacaacatcgatgtcatcttaaatgcaattgaatccaccgttagcgctacatttcatataaaagaaagaacaattattataaacaaaaacgagtacacgaacaggtaaaacaaaggacggagatgttccaccatcatccgtccttacagaacaatgaataaatcagactggacatctcatttattcaaatactaatagattaaaccacaaatttatgaaaacttttgaatttcgacctcatgtacatgggcgtcctaaaagtaaaattattctaattatgaagatttgcacattcattcttctggtttttaacctcggattgtcagcctccggctactcgcagcagaaaaaagtcacgctggacttcaagaacgctacaagcaaggaatttttcgccgagattcaaaaacaaacaggttattgcttcattttcaacaccaatcaaggtgaacagatcggggaaatcaccatttctgtccgcgataaaagtgttcaggaagtcatggaagaaatactgcgtcccacgggattctcgtacactttccagaatgacatcatcgtgattacccccaaaatggcagaacccgagaaaaatatcttaaccggactggttttcgacgagaacaaacaacccctgccgggagtaaccgtcctcgtgaaggggtcaagcaatggagtaaccacgaacacgaaaggagaattctcgattaagttacaggaaaaggacaccctcgttttctcttttatcgggatggaatccgtcacgttaccctataccggacaaaaaacggtcacgatcacgctcaaatcaagcaaaaaagagctggaagaagtggttgtcacgggttaccaagtaatcgagaaacgcaaactgacatctgccgtggtgagcgtgaaaggttcagacgtgctggacccgatcaacacgtccatcgaccagatgttgcaaggaaaaataccgggattgcaggccattaatcagtcgggaacccccggagtagcacccaaaatcaggattcgaggctcctcctcgatctcgggaagtcgggaacccgtgtgggtggtcgacggcgtgatcctttccgacccgataccgcttaccccggaagagatcaacagcatggacaacgtgaatctgatcgggaacgcgatttccttcctgaacccggaagacattgaccggattgacattttaaaagatgcctctgccacggctctttacggggtacgtgccgccaacggggtgatcgtgatcaccaccaaaagaggccaatccggcccgccaagggtgaacttctcgacgaacctttccgtcgttgcccgcccaaactattccatcatgaaacaaatgaattcgaaagaccgtatcgaggtctcggaagaaatgcaggagaaagcattacatttcaacaaatatgacccgtctgaaatcggttacgaaggagcgttaagggatctgtgggagcgtcgcatcacctaccaagaattcaaccaacaggtgaaaaaactaaaggaaatgaacacggattggtacgatctcctgttccacacctcgttcacgcaaagttataacctatccgtttccgggggaagtgatcgggtgaattattacatatcagccgggtacaacgatcagaaaggcgtggcaaagccggaaaaatacactcgctacaacgccttggcaaaagtggatgtcaatttataccccaatctaaaaataggggcagacatttcctctgcccgggtaaaaagcaagcgcacgcatagttctgtcgatctgtaccagtacgcgtatgaaacctcccgggctatccccgcctacaacgaggacggaagtgattatttttacaccacgaaagaagggttgaaaaacacggcaaaagattattactcgccggatattaagttcaacatatttcacgaactggatcattccggctacgagagtacgaccagcaacacgtccatgaattttcaccttgactggaaactgttctccatgttcaactggcacacccagttcaacctgaccactactcacacaaatgaacaggaatgggtggacgaacaatccacattcgcacaatccaaacggttgctcgcgtacggcgtcaaagaacccgatgcgaaattagcctccaattattacacggacacggaacttcccatgggtgggatcttgaatgaaaaggattaccggggacagtcctaccagttaacaagttccctcagctatttccaaacgttccaaaaacatgaagttaacgccattgccggaatagaaatcaactctaggaagatggacggtaaaactgaaacaaattacgggtatctccgggaacggggacacaaattcgccaagatcgttttggaaaactacagcaagtacaggaacaccgtggccgaaaactatccggctatcacggacaccaaagacaacaaagtctctttttacggggctttcacctacacgttcgacaacaggtacagtttcaatttcaacatccgggctgacggttcaaatcaattcgggaaagacatttccacccgattcctaccgatatggtccatctccggaagatggaacgcccacgaggagctattccttcaaaatgtgaaatggctggaggttctagccgtgcgaggctctttcggtatacagggaaatgtcaacgaagagcaagttcccgacatgatcctgaccatggggggtatggataatatctcggaagagtattcgtccacgctatacaaggttcccaatgaccatttaaaatgggaaaagacacaatcctacaacttgggaatcaatctggttgtcttgaaaggcttacttgacgttaccctagaaggatataaaaagacgggaaagaacatgatcgtgaccaaggaaattacctccacgaacggggcatcccgggtggccatcaaccgaggttctcttcggaataaaggttgggagttatccgtcgggcttaaacctttaaatcgcaaagactacgggataagtctatcctttaatacatccaaagtgtacaacaaggttaccaacgccgataaggaacaacataccacctatacaaattacgtcaatggaagcgtgatcaccaacggcaaaccggtaaacacgttctactcctatcaatttgacaaattggacgctaatggttatccgacattcaagaactacaacgaacaatacttggaagacggggatggtcacaaaaaaggggatttcatcatcagttcctacgacgaggcatacgcccgggctttcgttgccatgggaagccgggagccggatttaagcggtggtctctctgccgacttccggtataaacgtttctctctaagttccacgttcgcttttaacttggggcataaggttcgattaaacaacctctacgtggcgaatcaaacgctgccctatccgcagcaaaacatgagtaccgaatacgtgaacaggtggcgaaaacccggggatgaagaccggacgaacatacctcggttaagtgacgatgctttaagaatatcggaatggaatgatgcctacgtgaaggtgtacccgcaggatttgaaataccctgttgcggcatctttgtgggaaatgtacaattattcggatttacggaccgtgtccagtagtttcttacgttgcacgaacctatccttgaattacaggttcccggaagaatggtgcaaaaggctctttctgaattcattgaatctcgggttctccgtgtccaacctttttgttatcaaagataaagccctcaagggacgggacccggaacaaatcagcctcggggctcgctccattccaccacaacaaacttattccatgcggctatcacttaatttttaatccctgaagtcatgaaaaaaatatatattatactcgcaattctggtcctgttgacacaaggatgtaatgatttccttgaacccgaatcacaggataaagtcgttcctaaaacggtctctcacctgcgagaactcttactcggagagatcatccagaacaaaaaagactacaccgaatatttgtccgtcatgacagatgatttcgcggatcaagacgggaaccagtatgaataccgcaaccagctgtggggctactacacgtggcaacgggaacccgaagagggacgagatctggcgacgaggaatgacgaggcatggagcgaattatatcataccattttcatctgcaatatcatcattgataaaacaccttccatgcacggcacggatgaagaaaagaatcaactactggcagagacttatttcatgcgggcccaagcttatttcgagttaataaacttgtacggagaaccctacgaaagcgcggagcaagccgagaaagccctcggggtcccgattaacgaggaaatcacgatcatggataacatctattccagagagactctagcgaaagtgtacgcgaagatagagtccgatttacacgagtcgatcgcacgttttaaaaacacggaatggaccaagaatgtggttcacccgagcctagacgtggcttacctgtttgcctcccggctgcatctttacaaaaaagagtaccagttagccaagaattatgccgacagcgttatcaataacgagaggtaccagctctacgacttacatacagccggcctgacttcctactcctattttatcaacagaaataacccagagatcatgttctgttacggcatggccagttttgattttatctataattactcttccacgtatgcaacataccttgtctccgataagatcatttcactttttagtaatgatgacttgcgcaaaaccacattttgggacaagaataagaaacctcacaaattcagtagcacgaattcccagtcctacggaaatacctatcgtctgtcagaagcctacctaaaccgggccgaggctttagttttcttggataagtgggaatcggccatcacggatattaacacaatcagggaaaagcgtatcgagaacgattacgaaatcacggccaccaaccgggaggatgccctgaacaaagtctgggaagaacgcaggagagaactttgtttcgagaaacatcgctggttcgacctgagaagacagggaatgccggaactacgacacattttcacgaacgggggaagtcggaaagaatacattctacccgcgggaagtaaatcctacacgctaccgatccctaaaaagatcagagagcaaaataagattatcgtgaacatcgaacgccccgaacagctataaacctataaaaaccgaaactatgaaaagtatatatatc

SEQ ID NO: 246 - DNA, 6472 bp, Butyricimonas faecihominis
atattaaagtatatagtttatctttacgataaataaaaagtaacaagtaaagccgtggaagggcggcattgaaaatatgggaaaagaagatacgagacgactaaaacagatcatgacttcggcaggagaagaagcaaaacgactggggaattccaagatttacccggagcatttgtttttgggattgctgaagttgagaagtggaagggcgattgatatattaatgtctttggggttggatttctacgaggtgaaagataagatagagcaacgcttggaggggaaacgctataaatccgacaaggtggaaagtcttgactttacattggcggcgaatagcgtgttgaaacgtgtgtccgacgaggcgtgggatctgggggatgacgaattggactcggaacacgtgatgctggcaatattgaggaatcaagccggtttcgtgacgaagctatttaaaacgatgaatatagattacgacatctttaaagaagccgtactaaaagagaagatgcggatgcaatccgaatttaatgacgagggggatgatccggaggacggagacgatgaatcttccatgtataatccttatcgtcaaggaggccctgtttcttccaaatccgatactcccgtgctggataatttcggaaatgacatcacgaaagccgcggaagagggagctttggacccgatcgtgggacgtgaccgggagatcgaacgtctggcacagattctgagtcgtcgtaagaagaataacccggtgttgattggtgatccgggggtgggtaaatcggctattgccgagggacttgccttgcgcattgttcagaaaaaggtgtcacgggtactgtttgacaagcgggtgatttcgctggatatagcctctatcgtggcaggtacgaagtaccggggccaattcgaggaacgaatgaaagcgattcttgccgagctggcgaagaaccggaatatcattttgtttattgatgagattcacacgattgtcggggccggaggttccgggggcaacttggatgcggctaatatgttgaaaccggcattggctcgcggagaaattcaatgtatcggggctacgacgctagacgagtatcgccagaatatagagaaggacggtgctttggaacgtcgtttccaaaaggtgttggtggaaccgacctcgtttgacgagacggtggaaattttgaataatattaaatcccgttacgaggatcatcataacgtgcgttacacggatgaggctatcaaggcctgtgtgaagttgacaacccgttatatctccgatcgggctttgccggataaggcgattgatgccttggatgaggcggggtcgagagtacatatttccaatataaatgtgccgccgattatcgaacagttggagaaggacgtggaagaggtgaaggagaagaagaaggaggccgtgaaacaacagaatttcgaggtggcagccgctttccgggataaggaacggcagttgttgaaacaattggaagaagagaaagtaaattgggagcgggatttgcaggaaaaccgggtgaccgtgaccgaagagcatattgccgaggtggtggccatgatgaccggggttccggtgaaacgtattgccaagaccgaggggatgaagttgttgcagatgcacgatgaattgagcgagagtgttgtcggacagaaagaggcgatcgagaaaatcgtgaaagccatacatcggaatcgtgccggactgaaagatccgaatcgtccgatcggttcatttattttcttggggccgacgggtgtcggaaagacacagttagccaaggtgctggcccgttacttgtttgataccgaggatgcgttgatccggattgacatgagtgaatacatggaaaaattcgccgtgtcccgattggtaggggcgcctccggggtacgtgggatacgaggaaggcgggcagttgaccgagaaagtacgtcgtaaaccgtattctgtcgtgttgctggatgaaatcgagaaggctcatccggatgtgttcaatattctgttgcagttgttggacgacggacagttgactgatagtctaggacggaaagtggatttcaagaacacgatcgtgatcatgacttctaatatcggtagccgtcagttgaaagatttcggccggggaatcggtttcggttcccagaacatggaaggaaatagcgagtacgccagaggggttgttcagaaagcgttgaaaaatgccttctcacctgagttcttgaatcgtattgacgatattatcatgtttaatcctttgactaaagaggatatttacaagattatagatatcgagttgaagagcctgttcaagcgggtaaatgatctcggtttggtgatcacgatctcgaaagaggcgaaagactttattatcgagaaaggatatgacccgcagtacggggcccgtccgctgaaacgagctatccagaaatatctggaagatgaattggccgaggtgattattaaaggtatagcggaaggaacggagctagatgtcggttatgataaagaaaacgataagttgattatcaccgagaaggaaaataagtgaaggtgaaatcgttttaaaaagaaaaggggctgtcccaaaagtcatttctcaaactccctccccccttcggggtactccctctataaacagagggagagttgaaatactccctttcttcgggaagagtcaccagctcctcctctgtttatagaggaggtggcacgaagtgacggaggagtttcttgaaataaaataactttttggacagcccttttctttatcgatattaaaagctttattttttgattactttctgtaaggcgtgtatcatgggttccacgctgaggtcatttcccgtggcttgaatcatccactcgtttggagttaggcgtcccaagcgatagatgcggtcaacttcttgagcgaagttcttaccgttgaggtaatcttccagctggaattcgatgatctgaccgaaggcgtaagcggacaggtatagcgggtaactgatcatgtgggaatagacggctaaaaccgtttcgtcttttttgccgaagacaggggcatagtatttattccatatttcttttgacaagctgatagaggcttcttttagctgttcagccgtcgcattcgggttcgcatacagccattcccagatggagatgtcgagcatggagactcccatgatttcgtacaggctccaaaatttgtcaagaatgtccatcttgtccttttccggatcgttgttttcaatgcccaataattgcagatcccgtttttggaacacgaaagcaagtgcttccgtgaaagccgtgttgggaactccggccatcatgaaattgtctacattgtatatggaaatagtttgttccacgttgtggccgaattcgtgaacggcgatattgtaccccttataattcattccttccgcgggaatacgggtacgaagatgggactgttgtcccttcatggcggcaccccacgcgtgtcctgatcctcgtgcggcatccacggctattttatcacagatctcgtttgctctttcgggggtgaaacccaaatgtgtgagcagggaggggagcccggccttgaaagcctctgcattcgggtaaagtttttgtatctgggcatccagtttggcctcgtccagattactacgaggtttgaaaccatcgtaccaaatgtcgtatgcttccagtttgcggcctagacgtttggaaataatcttgccgacttctttcaattccggagaagtgaggaattgggtgaaaagagcttttacatcttctaccgatacttccatttctcccgaaaactttcgttcaatgaaattcttgtcggcataagggtcgatggctttcatagcgtggaagttattcaacatacgttgataacgttctgttgcctccggggttcccgtggcagtttgtccgttttgagtgagtgtgttcgtgtaaggattccagtcgtaagctccggaattgatgacttgcacggggatctcctgcgagataattcgtttcatgacctcataaacggtgcgttgcttatccaaaccttctttccctttgttgtaattggccttgatttcgtctcttaaattccaatgagtaagcagaattttatcttcggggaaaagcttttggcctttggcgtttagcacatgacccatgtaaatgttgtagcttgaaatatacacgtctgcatcactttccgcttttacaccagcttgaattagttctgccggaacccgttgggtaaacacgtcaccgaggcgagcataggcccaagccatgcggtcgttacctagtttttctttgtcttgtaaaggtacttccgggaagttgagggcaatgataaagccgattttattgttgtaaaaatcattaatcaaatgagagccgggactgtaagcaccgaacatgggatcgatgtcatgaagaggaccgttgtcctgatgtaagtttaattgaagttggagtgtgatttcgttaaaatgtccccataaggcctcgaagtaatgacttaccttttggaatacctgttgtttttgttccgggtctgtaatatagtttttcacgcaaaattcttgaaattcggagtctgtgccatcttgtgattgccaaaggtgggcgacttggcgtactccggtttcgatagcggtagtgttagtaactccttttgcctgaatgtcggtaatggtggcttgaattgttttctccgggattgcagctttcgccaagaatcccgagaataggcataccaataataacgagtgtttcataaccgttttagtttataaatttgaggggctgtaaactacagcccctcgatttggtttattgatttagtagttggaaatatacaatgtcttcccagccgtttccccggcggagccagtttttccggtacccggtctgcacgaaaccgagtttctcgaaaagtttgcgactaccaatgtttccactgggtacgctactgtaaatctggttcagtcccagtgtttcgaagcaatagtcgatcatcagacggatagcggctgtcgcatatccctgtttttggttttctgtattgtggatcataatcccgataccggcacgctgatgatatggatcgaaatcatagagatcaactaatccaatccgggcatttgtatccactctttcaatcatcagacggagttgcttggtggtatatatatccagatgacaagtttcgatgtatttctttaacgtgaacagggagaagggggtaagcgtgtcactgacttcccataaatccatatcattttcccattgatacagacattctaagtcttcaggttctaaagctcttaagcgaatgatgtcatcgtttatcatagttgctgttttataatttttttcgaataagtagtattatttgtcgctttcaaatataacactttttggcattagttggtgttaacgcggagaaaaaaataggtcgggagataaatcttgccacttttaaaactatctttgtcgggaaagataaacaggtatcatcatagagcaatattcatgtataatttactgaccatcttgggggctacggccacgggaaagacctctttagcggtacgtttggccgcggaattgaaaggagagattatttcagccgattcgagacaaatttatcgaggaatggatcttggtacggggaaggatctggacgagtatgtctacgaggggacgcctgtaccttatcatttgattgatattgccgatgccgggtttcgttttaatctgttcatgtatcagcaggagtttttaaaagtgtggcaggattgtgaacgtaggggtatttttcccgtgttgtgcgggggaagtggtttgtacgtggagtccatattgaaagcttaccggatgactcctgttccggaaaatcccgaattacgggaacggttggcctgtaagtcgttggcggaattatccgacatcttgtcctcctatcgttccttacacaacacgacggatacggacacggtaaagcgggcgattcgggctattgagattgccgagtattatactacacatgaacccgtgaaaggggagttcccggagatccgatctttgattgtcgggatcctatttgatcgtgagactcggcgacaacggattacagaacgtttacacgcccgcttgcaggcgggaatgattgatgaggtgaaggggttgcttgaccggggaataaaaccggaagacttgatatattacgggttagagtataaataccttaccttgtatcttaccggagagttgacttatgacgagatggtggaacaactgaacattgccattcaccagtttgctaagcgacaaatgacatggttccgtaaaatggaacgggacgggttcgagatcaaatggctggatggaaatatgcctttggatgagaaggtcgaacaggtgaaagagtggctttatt

SEQ ID NO: 247 - DNA, 6465 bp, Butyricimonas faecihominis
attgaaattatgtttatccaaataattaaaagtataagtcaacaaattttcattcaagatagacaaatcttttgttattgtcccttcggaagtagagaaatgagtataagaatccaaggctcgcggcttaaaagtattctgattctgttgattataatcaatcccggcagaaaccttcaaatgcaaattacgtatcaactcataatctaatgacatattataacgcagcgaataactatgatttttctctgaaatttcattatatttttggataatcaaatcccctataacaccacctcctggcaatagagtagacgtatttttagcatcggaactaatcccctcaaacttacttccaccaacaccggcagaagttcctcgactacggtcactatacgtaaggctcaattgtgtgtccatacgcaaacgctttgtcggattggcggtcaaatttgacaatacattaaaacgcttgaaatcagtattaatcgcaattcctttttcatcataataaccggctccaaccatgtaacgcacactctacgatcccccggaagcttgcaaattcgcattaaccacccccgcattcctgtaattttgacgataccaatgcgttgaattattgtaaaaaggattcaaactatcttgtaacgccaccgcatcttgaggtcccgttttcccccaaaaccaattataaataggaccattagttcccttattcgcaaaaacttcttcataagataccggaactttccattctcctgacgccgtcttgtaaggcgcaacagtgttacgcaaagcattcaaaaaaaacaatctttcgtaccgtcctcctgactgttctggagctttcggcaaccaagacacggaataagacacatttgcattgaactgcgcttttcccgcacgccctttctttgttgtaataagaatgacaccgttacccgcacgagaaccataaatagcagcagaagccgcatctttcaagacctcaatagactctatcatggaaggatcaagatcagataaagtattcgctcccgtaaccgaagaagtaaatgcctgcatcggtaccccgtcaattacatacaaaggagttccatattgacggtccgcactctctcccgctacacccaaggaattataaccgcgaatagccactaaagaaccacctcctccaggagaaccggatatattactaacctctactccagccatatgcccttgtaacaagttttccaagctatgcgtcggtaattcttttaactcttccccttttacagaagatatagcactgatcacggtacgctttttctgggaaccataagccactacctgaacttcatctaacccggaaacatcctcctccattttcacgatcaccaatttccccgcagtataagccactctttttgttttaaaaccgacaaaagaaaataccaaatgtcctgcccctttaggtagaggtaaaacaaaatgtcctgccgtgtccgtcgctgtgccgatttgggtactatccaaaagcaccgtgacccccggcatgggaacattattgttatcaacaaccttcccctctatgacatacacctttttctcatcatcccttgcggcacggattataaccacattatcatcataagaaaaagtcaatcccaacgaaggcaaccactcttccagcacttgattcaaaggtttattttggactttcaaacttactaaccccttctgctgaatcatctgattattgtacaagaaatcacaacctgcttgcacaccaagttctgtaaaaattgtttttaaagagacattttccatctccacgttcactactgcctgctgagaataaacactagcttgtaccgaaataaaaaaaacaaactgaaaaagaaaatacaatttcataaagattaacattttccgaataagaatgcctcgcaaagcccttattcgaattcgacttttttgcatacttttgtttttaagattacacatggtacaacaatcttttcacacatccttgttgtactttatctaaagttggaaattggggaatttccaacttttatttcttccttatcataacatttcttccatttaattcaaattcaaccaaattcatctgttcaaattttcgcaataacccttccacacgatcatatcgccttaaacgtcccgtaaattccaatgacttaacctcggcattcacataaaagacattcaaatcataccataaagataatgtctccatgatctcctctaacgtcatctgttcaaacttataatacccatctttccacgatgtatataacttcgtgtcaaccgacctcattttaaattgactattttttttgtcataaactacctgttttcctggtacaacatccacctgctccttcccgttcgttatttgaatccgtccctgctctaaggtagtctctattttttcatgctcaggataagaagtcacgttaaaagaggtacccaatacccgaatccgaacatctcccgtttgtacaaaaaacggacgatgttcatcttttgcgacctcgaaataagcttcccccttcaatcccacttctcgtttatctccgggaaataccactggataataaatttccgaactagcattcagaaacaccttcgtgccgtctgccaacactatactatattccgacccccggggaatcacaagagtatcgtatctcacctccgttgatgccacagtatcatacgaatattttaacatgtaatcaaaattagtgatctggacactatcttcacggatcatcattccctgatatttatccagttcaatcatttcacccgtactcaatttcagatgaaccttagaaacattcatcttttgaacaagatcaacaggaatatcaagatcctctggcttcaatcccgaccttccaaatatcaatacgcatcctactaataaaacggcaacaacagcaaccccggagtaataccatctaattctccgcattctctgccgacgctgcacctccttttccatccgttcgagaacaaactctttccggcaaaccgccttttccctcatcaagcgggaactccgaaacatcccttgtaggagctcgatatccttttctcccgcgtgttcccgcaaccatcttttaacttcctgtcgctcttcttccaacacacattctcccgccaaataagcagctattatttcatgaattttatcactcattattagtcatttttccttaaaggaacctaactattcattttgggtgacagcagaaaacaattttttgaaaaataatactagaatcaatgcatcatccgctccgagtgctcgtcgtagaaattgaaaagccctccccatctgtgtcttaacagtattaatgctgatacctaaacaatctgcaacctcttggtatttcatcccttccatacaaaccatatgcaatacccgcttgcgttcttccggtaacgtttctattgcaaggtacaacttttcaattaattccgaattctcatcagaaacctcacaatacaattcatcgcgaatctgttcactcttaccctcccgccgacgggtatttcgcaaataattcaaacatccatgctttaccgccgagaaaagataatgttccaaacttccccgtaacaaagaaaaacgacgattctcccaaaaatcgacaaaacactcctgaacaatatctgcagcttcttccgcctcgccaataaactgtgtagcaaatagaactaaagaatcataaaatgaatcatataatagacgaaaacctttccgctcgtcatttttaaattgcaacaatatcctctccgagtttttcattctatatttaatcctcattttacgggctaaaaataataaaaactcttatatattccatatcaattttccgaatgatactccacctccccatcaaaacgtggaatcacgagaacctccaccactttgtctccaaactgctttctttcaatactgatcgtccgatccacctcctccccgaaagcctccttgatcctttggtgaagaaacagctcatacttgtccaaattgcaacacaaataatccaaatccgcttgaatccccacaggtacccccttatcactcatcccgatatacacggctcctccctgattgttcaagaaacggcacatatcctgcatgatagagtccaattgggcctccacatccacgtgcttcgcccccaccggatagaccaacgaattcttaaacgtcctcttttcttccatattcccggacacgagatcttcttcaccttttcccttcaacgacagcaattccaataactcatcctccctccaacgggattcttccgtaagatttccctgcccctcttttgccaatatagattcggccactttagccacgtaatcatccttcgaatgagaaagacgttccaaatcccccgcgaaagaacggtccccgtaggacgccagcatccggatcaccgcccacaaaggctccaatgccgggtaagcccggaagtctttctccaacacgcccagatccaatgtttccaaacgcccctctataaattcatacttcacgatcaaatgattgatcaggcaatcataataccctttcaaacgataatcacccaacacgtgagccaacaagcgaataaaataaagtaaattcagattctccaaacagacctcttgcgtcaggtaaagctgcaacagtcggatcaactccttcacgtacttacccgaaaccccgatagaacgctcgatcttgcccgtgttaaactttccctgcccgtccccgtttttatatttcttgcactcttctatataactgtaaaccagattggccactgcctcatgccggtcaaaccgttccttcgtcgcttccaaaatctttcccttgattcttcctaccggggggacatccgtgatttccaaaagatagtacccccccctttcctcgcttaccccctctgccagaggagtagaaaccaagaaaccactttcagacagccatgtcacgaaaccattcttctcgctcaagagtaaggcgttacactgatcaccaacccgcaaatgctccacggccacctgattcagttcctcccagatcgagaactgcaagcggtcatcctccgactccaccaccgtcgccgtcataatatccccgggatgaagaatatctttcaaactatccagccttgcccgtgtcacttgactgacatgcagaataccctgcccgtcgtactgcgggtccacgatcgcgacgaaagccagcgtgggtttaaaattatgcaccagcttcacccgtatattcacgacagcccccacgggcggccgctttttatgaatcacgctctttctcaattcatccgaaaagtcagcgaggatacctctccacgcttgagtcgttcccaccaacccttcctcgaaactcaactttttcttactgtacccgagtttcagagcaacaccgtcaatctccatcagcgtgtcaaactttaatgaaaccggggcagcaagcgtgatcgctttcgtttccaccaataactgcccgtgtccctcgtacagacgcccctgacaatttctaatcgcatcaaccgtcttttctgcaatagattccatcaggacgggaatagagaactttaacaaatcctcccacgtgaacacggcattcttctggttaaataacaaagaattaaacgcgttcttccgaatcacctcatcttccttatcccgtaacacatacaagtacctgaaaaacatggaacgcaagcttgccagctcttcctgcacgggatcccccaacaagatccgggcccccagaatccaaacagcctcctgaatctgatcccgggtatatccctcaaaacacagcgtatcatcctgttctctcacaagagctacccgttcgttaaaacgttccatcacccttggattaggtttattcaacgtgttatacaccagtaaaacgagtccccgtgccggcaataaatgcaacctcggactaaaccgaacgatcgtcagtagcgttatccacacgagcgatttcttgtacaggtaacccgacaccatcaatttctccaacttcgaagtaatatactccccttcttccccagcatcaatcagccggaccgcctccctactggcaatagcctcatccagataacgttccacctgcattcgggcatcattcagcttgaccccctcaaaacatttcaaataatcggatccctcaagcatccattccagtatacgaataaaaatatcattcagaagatcataatcctccaagatcatttcctctccccccaactccgcacgaacaacacccaagaaagaaaatatccactccggcccttgttttccaacaaccgtgaaatcataatcgcaaatatactcgtcaagaatgcctgcctcttctttcgtgagaggaagttcctcgaacaaatgttcaggagatacaaaatc

SEQ ID NO: 248 - DNA, 6456 bp, Butyricimonas faecihominis
ctaaatatgtgttaaaagaagaattgaagcttaagtaattataaattcattaaacagatgcagaataaaggagcgattacactactcgctgttgctttggcattggtgagtctttatcagttgttttttacttataaaaccaaccaggtagagaacgcggcgaaggagttcgccaacggtaaccctattaaagagaaagagtatttagattcggtcgcaaaccaacccgtctacaatttcctcggtttggccaaattcacttacaaggaatgtaaggagttggaactgaacctcggtttggacttgaagggtggtatgaacgtgaccatggaagttgacgtggtagacgtggtaaaaagtctagcaaaccacagcacggatcccgctttcaatcaagcaatcgaggaagccgtgaagatgagagtttccagcccgaaagacttcgtaacccttttcggtgaggctttcgaaaaaattgccccgggagcgcaactggcatccccggctattttcggtactcacgaaatgaaagaaaagatcaaagtcggagctagcaacaaggaagttcttgacgtgatccgcaaagaggctgacggagctatcgacaacacgtttaacattcttcgtactcgtatcgaccgttttggtgttgctcaacccaatatccgtaaagctgacatctccggaagaatcgttatcgagttgccgggtatcaaggaaccgcaacgtgtgagagagttgttacaaggaactgccgctttggaattctatgaaacattcgacaacgcaaagggacaagatgccggagaagatgcattcatcaactacttggcagccgctgatcaaaaactaaaagaggttcttgacgcccaagcatccaaagttgcgaatgaagaaacaactgctcaggtaactgacacgactaaagtgcaagataaagaatcagccatcctagacgcgatcaaaggtgaatccgattcattgaaaacggtaaccagcatggctgaatacgagaaagaacatccacttcttgccatattatcacccaacatgactcaacaaggtcaacccgtgggtggttctacaattggatatgccaacattaaagatacggctaaaattaacgcctatttaagattaccgcaagtaaaagcagctttccccagaaacgcacgtttgttgtgggaaatgaaagctgtaaatggcatggttcctttacacgcgatcaagattaccactcgtaacggtaaagccccacttgaaggagacgctgtaattgatgcaagacaagactatgatcaacaaggtcgtccggttgtttccatgcagatgaacggagagggaaccaaaacatgggctcgtttgacaaaagataatatcggacgttgcatcgctatcgtacttgacggtatggttgcatcctctcccaacgtaaacgacgagattaagggcggtagctctcagatttccggacgttttgacgtgaaagaggcaggagaccttgcaaacatcttgaaatccggtaaattacccgcccccgcacgtatcatcgctgacgaggtggttggagcatcactgggacaagaggctattcaatccggtatgtggtcattcatcattgcgttcgtgttggtattggcctatatgttattcttttatagtaagaatgccggtttggctgccgatatcgcattgctcgccaacttgttcttcttgttcggtattctggcatccattggagccgtattgaccttacccggtattgccggtatcgtgttgaccatgggtatggccgtcgatgccaacgtgttgatctacgaacgtatccaagaggaaatcagagccggtaagggattgaaacttgcaatcaaggaaggttacagtaatgcctactcggctattatcgacggtcagttgaccacgttattaactggatttatcctgtactacttcggagaaggcccgatcaaaggtttcgcaaccacgttgatcatcggtatcctttcttctctattcacagcaatcttcatcactcgtttgatccttgaaagagctgcatccaagagtgacaatgttaccttcacaaccccgttaactgcaaactggttgagaaataccaagtttccgtttttgaaaaaacggaaaatcagttacacgatttccggtatcgtgattgtactttgtttcgtatccctgtttactagaggtttggataaaggtatcgacttcgtgggaggtagaacttataccgtgacttttgcacaagacgtacaagtgggtgatgttgcagagaaactggcagaagtttacggaagcgctccggaagtgaagaccgtaggaactgcaaataacgtgaagatcaccacgaaataccggattgctgaaaccggagctgaggttgatgcgaatgtggactcattattatatatcgggttacaagaaattcttcccgccggaacagactacgaaactttccgcagcgtgaacttgcaacagacacaaaagatcggacccgccgtggctgaggacatgacaagagctgctgtatggtccgtattattcgccttgatcggtatctttatctacattatggtacgattctccagatggcaatatggtgccggagctgttgtcggcttggctcataacacgatcatcgtaatcggggcattctccttgtttgcaggtctgttaccgttctctttggaagttgatcaatcctttatcgctgccgtgttgacggttgttggttacacaatcaacgataccgtggttgtattcgaccgtatccgtgagtaccgtaaactataccccaaacgtgatgatgaacaagtagtaaatgatgcgttgaactctacgttacgtcgtacattcagtacttcattgtcaaccatcgtcgtgttgttagcgatattcgttttcggtggtgcttcaatcaagggattcattttcgccttgttagtaggtatcattgtcggtacatactcatcactgttcatcgcaactcctatttctttcgacttaaccagaagattcaaaaagaaagtagaagagaagaaataaaaaaatatttcaagtttatacaaaatagctcctgtaaaaaggagctatttttttgcacacgagataaaaggctcactccccggtattgcagtatacacatgccggtgtcccacaatcccccttccataacatcaaaaaagttacaaattgaaagtaaaaatgatatatcaatattaaagttgcaatataattgggtttataacaataaatatcctacttttgtaacgtagaaagcagcaacaggataatcgaacaattacaagtatgtcaaagcgtcagatcagaatctgtttaggaagttcttgtttttcccggggaaacaataccaacctcggagcaattaagaaatatctgagtgaaaataacttggaagcagagatcgatttctgcgggcatttgtgcgaggaattgtgtagtaagggtcctattatccggatcgatgacaaagtgtatgaagaagtaaatctatcgcgtttgtacaaaatcttacaagaagaattcccatgcaactgagacccatctatacagaaccggacaattgtcaggattgttataaatgtatccgggaatgtcccgtgaaggcaatccggatggaaaacaaccaagcatctatcattgaagatcgttgcatctactgcgggcattgcacgcaagtgtgtccaaccggggctaaaaagatacgtgacgggttaacccgtgcgaaattaacccttacgcagaatcccaaagtcattctatcactggccccctcgtacgtgagtgaattcgaaggaattcattccagtgtgctgattgccgccatcaaacgtttaggtttcacaagtgtatcggaaactgcccttggagctgaaatcgtcacggatagaaccgagaaattcctagaagaagccgaaaatggcgtgtacatctcttcggcttgtccggttgttgttgaatatatccgaaaatattccccggatcacgcacgttttatcacaccgattatttctcccatgctggctcacgccaagattctgaaacaattgtacggggaagatgtgaaaatcgtgtttgcaggtccctgtatctgcaagaagttggaagctgactactttaacaatctagttgacgtggtgatcacgttcaaggacctgaaaaaatggttcgaacaatccgacatcaacttgaaaaatatcgcaccaaatcaaccggaggcccgcttcgtgccttaccgttccggcttgggcgcttactaccctatcgaaggtgggatgctaaaagggatgcaagagggcaaaaaacaaatacatcacatggctttctcggaactttcaaccgtgaaagacgtgttgaaagaactggattcacaccgggagaacgattccattttcttggaattattggcttgcaagggcggatgcatcaacggtcctgccaaattgagccacatatccccggccttaaaaagatacgagattattcatcaatcagaattgggaaaccccaaggatgatttcaaaaatatcgatttgcagattctattctgcaaagaccctcacgtgcaagatcacacctacacggaagaggaaatcaaacaggctatggccgtcgtgggcaaaaccggacctgaagacgaattaaattgtagtggttgcggttacgacacttgtcgtgatttcgccattgccatgctggaagggcgggccgaagaaaatatgtgtgtatcttacatgagaagaatcgcacatgataaggccaccgtactcctccaaaagattccggccggagtattactcgtcaactcggaattgaaagtcgtagacatgaatcaatcctgcgccacactcatgggagaggacattgcctctatttacgaggtcgatcccggtttgaacggtatggagctgaaaaacatctgttcctacgaggacttgttccgtgccgtgttgacaaccggtaaggaaattatcgaacgacaggtacgggaagaagaccgcacatggattatatccatctataacatacaacctcaccggttggttttcgggttattacaggatttacgcgaaccttatgtccgtaaagaatggatgctcgaaaagacccaagaagtaatcaagaaacacatggaaaccgtccagcaagtagcttgtttgcttggagaaaatgccgctttcacggatgcaacgttacgctccgtaatggaggcttacaagaaaaatgatcaaaagaaaccactctaatttcatttgtcttgagaaacaacggtaatttcatcgaggttgacttcttccagaagaataaagcgggcaatgttgtctgcggggattgtttcatgtctcaaaaactaaaaggtgagggacgtgttatcagcgtgttatcagatggtctgggaagcgggatcaaagcctgtgtcctatccacgatgacagcaaccatggccatgaactttaccgccatgaacgagagcatcctacgcacctccacctcgatcatgaataccctgccgaaagacatggtgcgaaagatcagttattcgaccttttgtatctgtgacatcgactgtttcggtaacgtgaaaattatcgagtacgaaaccccctcctactacttgtaccggaacgggcgtttcgtcagtatttccaaggagaaaattccggtggaacgggaagaccttgaaaatacgtttctgtggatctccgagttcacgctggaaaaagaagatcgaattatcttcttcagtgacggggttagccaatccggcatgggaacggctaaaatgccctttggctgggaagacggggcaaaagaatatattgcaaacctagtaaatcaatataatgatatatccgccaaggaattggcacataagatagtgaatcaagcggaaaagaacgacggttactcgctgaaagatgacacgagttgttgtgtcatttatatgcgaaaaccccgtaacttgcttgtatgcaccggacctccctacgacgagaagaacgataaatacctggctaaccgggtacgggaatttcaagggaaaaagatcctgtgcgggggaaccacggccaccattatctcccgtgaactgggagcaaaaatggaagttgacatgaatatcgtggacaaagaactccctcccatctccaagatggaaggtgtcgatcttgtcaccgaaggaattctgacgttaggtaaggttgagcgtatcctgacggaaggagatattgaccgccgtcgggaagccggaccggcagagctgatggtgagaatgttgttgaatagtgataaaatcacgttactcgtgggaacccgtatcaacacggcgcaccaggatcccaatcttcccgtggagttagagatccggagaaacgtggtcaaaaaaataaaatttttattggagacaaagtatttgaa

SEQ ID NO: 249 - DNA, 6447 bp, Butyricimonas faecihominis
atatcaattaatatgagtacaaacaaaataatcgaaatcctaggagatcaaagtgattttctattgaaccacacctgtaaaaccattgataaatcgttacttcacatcccgtcacccaatactattgatgaaatttggatgtcatccgatagaaatacccgtacactgaacagtctgcaaagcatcctgagtcacggtcgtttggcaaatagcggctacgtgtccattctccccgtggatcaaggagttgaacactcggcaggagcgtctttcgccccgaatcctctctattttgatccggaaaacatcataaaacttgctatcgagggcgggtgtaacgccgtggcatcgacattcggagtactcggggccgtggctcgtaaatacgctcacaaaatcccgtttatcgtgaaaatcaatcacaatgaattattgacctacccaaatcgatacgaccaaacactatacggtacggtagaagaggcatggaatatgggagccgccgcggtaggtgccacaatttatttcggctctccggaaagtcgcagacaaatactagaagtatcagaggcatttgcccatgcacatgaactgggtatggcgaccatcctctggtgttaccttcgtaatgaaagtttcaaaaaagacgggatagattaccactcggcagcagatttgacaggccaagccaatcacctaggggcaacgatccaagctgacatcgtaaaacaaaaactcccaacggttaacgggggatttaccacacttaaattcggaaaaacgaatgagaaagtttataccgaacttacgtcctcccacccgatagacctctgccgttaccaagtggccaacagctacatgggacgcattggcctgatcaactccgggggtgaatctaaaggatcatccgatttaaaagaagctgtcataacagccgtgatcaacaaacgagccggtggaatgggacttatcagcggacgaaaagccttccagaaaccgatgaatcaaggtgtagaattactaaatgctatccaagacgtttacctagacaaaaatatcacgttagcttaacaggaatagcagtctaggagggtgtgtccaacttttggggcacacttaaaaatggcacaccctctttgtataatatctcttactactctcttcggtatctcttcgtactctcgctaatacatgaaccaaatttcaagaaaaaattaaaagcaaattaaccagtcacaccgttaacctatcgttaacctacctacgagacacactggaatatcccttgaaaatccctttcaatataggagtaaaatacacgaccgtctgttttttattcttatctttgtgaagaagacataaccccggttcaccatggatgaaagagtactcgataagctaaaaatactcgctgaatcagcgaaatacgatgtatcctgtgcttctagcggaacctcccgttctcacaaaaaaggacagatcgggagcgcagaagggtggggtatatgtcatagtttcgcagaagacggacgctgtatctctctactgaaaatcatgctcacgaacaactgtatctacgattgtgcctattgcatcaatcgcaggagcaacgacctgccgagagccacgttctccgtcacggaactcgtgaacctgacgatagaattctatcgcaggaattacatcgagggcctcttcctcagctcgggagtagtacgcaatccagactacacgatggaacgtttggtaaaagtggtaaaggacttgcgacaagtgtaccgctttaacggatacatccatttgaaaagtattcccggcgccagtcaggaactggtcaacgaggccggcttatacgcagatcgcatgagtgtaaacatcgaaatccccaacgagcaaagcctgcaacttcttgccccggaaaaagactttcaaagcgtgttcacccccatgcgctacatccagcaaggaatgttacaaagtgccgaggaacgaaagaaataccgccatgccccccactttgtccccgcgggacaaagtacacagatgatcgtgggagccacttccgattcggataaggacatcttacacctaacctctgcactctacaaacgtccaagtatgaaaagggtatattattcgggattcgtccccgtcaacgggtacgacaaccgcctaccggctctaaaacaaccacctctcgtgagagaaaaccgattgtatcaagccgattggctactccggttttacaatttcaaggttgacgaaatcgtggatgattcttatccagatttagacttggaaattgacccgaaactagcttgggctcttcgccatccggaagcatttcccgtggacatcaaccgggcggattacgaaatgttattgcgtgttcccgggcttggagtgaagtctgccaagatgattctcacggcccgccgctattcccgtttggggacatcccatctgaaacagatcggtgtcgttctcaaaaaagcccagtatttcatcacgtgcaatgaactacctacccgaaccgttaacgaaataaaacccgaaaatgtaaggcggattctgacacaaagaagagcaacccgtgtcgacgatggtcaactgatcatccccttcgtttattaattgaattagtccgacttcatggcacttgaaatcgtaaatctaaaatcgcaaatctaaaattaatatgctcatattccggtacgacaaaacctttgaaggactgttaacagcgatttttgacgcttatagcatcaaaagatttcccgatgtattgctagcagaagaagaaacaccacctctattctatgatgaaatcattacggtcattacggatgagggaagaagtaaccgggtatggaaaggacttcaaaagaaactatctgcctcggcccttaccagtcttacaacctgctggctatccgaactcccggagattgacctcgtactattccgttacattcacaaagccatcgacgcaccccgctccatcgaactcaatttcggggaccccgacgtgttggaactctccaaagtctggaaaaaagtaaacaacgaacggttgcgggtcatgcaattcctgcgctttcagaaagcagccgacggaacctatttcgccgctttgaaaccactatacaacgtgatctcgctcgtgattccctatctccaagatcgttttgccgatcaaaaatggttactctatgacctcaagcgggaatacggttattatcacgaccagtcaaccatcaccgaggtacactttgaacaaaaagaaggacatcttcaaagcggtttcctcgacgaaagcatcatggatcaagacgaaaaactttttcaaaaactctggcaaacctatttcaaggcaattactataaaagaacgcctgaatcctaaactacatcgccaaaatctccctgcccacttttggaaatacttgccggagaaaaagggataataatatcccttcttatcatgttgtcggctgaatctcatcccattctgccccatcacttgccccgatcaaccaattgaaagcataatgccgttccatcacaacaccaccatccaatgacgccggggtctcctcgccttttacacgggcatccacgcaagcccaatcataacgtaacgtcagatcagcctcgtccaaaatctcctgccgatcccgaatttcacctaaccccaacaccgtcccgttctccttgtgatcaaaaaataagcgagcgatatacggaacgtcacagatcgccgaaggataaggtaaatcaatgattcccagagtccataataacacggcacagcactcgtaacgccacaagaactggatgcaatcatactgttccggcgaaggagtatcaagatacgccctctctaacggagtaaattcatccatgatatgatacccctcgtcaacccgggccacaaaccctaaagcctcttcccgatccgggttttccgataacatcacctctgaatacaaggctacggcaaacaaggctgccgcacgacgggctatttcttccggctttcttatcatcgcctcacaatccaatacctcgcaaggtaaatgttccatataaggcactcccgcctctttcaaacgtacgaaagaacgttcccgacgggcttgatccacgtctcgctcctccggacgtcccacctctaacaagtcggaattcgccaccggccggaaagtctcgtattcactctcgcccttaacggaaaaaagcaacttccctttgctatcaaaaagactcatactcggataaagcaaaaagccattcacatctcccgccacgtcataaaacgtgttaatgatgtaactcgtccggtctcggttatcatccagttcgaactcgatccccacgatacaattaaaacactgtatctgacgaatcacctcctctttaatggcagtcaagggagtgtctacccgcacaaaataatttaccataccttccgtgtgttcagctacttgatcagcttgacttcccgactccatcatagagcaacggatcatcgtatcatcctgcaacaagatcatccagcgatcatcttcgggagtaaacatcttcgtcacttcctgaaaacgcacacgcatagattcggcaacacgactgaaatccccgattaccgtgtaaagagttaaatttgctttttccatatattcctttttaatttagagcaaagatagacaaaatacaaaccctccctctatttttcgttgttatccatacatcaaatcacgtcccactctggttgaattcctaacaaccaattaaaagcatgatttcggtgcattgcaatatcggtatcaatatttcgaggcattttcttgttcttatccatagcttctacacacgccaaaagataatgcaatgtcacatcagcttcatccatgatctcccttcgccccttccggttaggaaaacccgtttcccaatcaattttagacgaagtcgcataaaacagatccattacttccagcatttttaccacctcgcaatgctcggaaggaaatgacatattcttgatcaatcccaaactccacatgaaaacattacattcctcaaattgccaaaaaaaacgtagatgatcattctcctcattattcttcgaaaataaataatccttttcctcctgtacacaatttttaagaggttcgaatccatcctcttccatatcgtgaatctgcttccaccacgtttccacaccttcctcaccgaaattcaatgcacagaacgcatgagaaccggttgaaacaatggccataattcgaccgatcacgctctcttctattctaattccgtatcgcgtgtaatctacttccatcggttctaaattttcaaaagccaccttctcatccttcaagcgtttcatcgtacgaacccgacgttctttgttctcgctatcatccgtcatgaaaaatttcttcataaagaaatctgtattaatcataggaccatacgtgacaaggtcgctcttcccctcgtcattaaatactaattcccgttttcccgagtaaaaactcatgtccgggaaaagcaaaagtccttgtaatttatctgccatatggaataatacatcacacatcatgttctcccgattcctgtcgccacgcttatattcaactttcaataccgtggtaaacaccttgatttgaaaaagcaaagaacttttcacctcctctttttgagtcgggacacgctcaaaataagacaccaattcagacgtatgtttgctcacctcctcgggttcacgctctttgtcaagcaattgacacttcacctcgcttcgatcattcaacacgtatttccaacgattcccatcaaattctcgtgaatgtataaaacaatcaagcattcgatttaattcaatggctacttgccctgaatctccagtcacacaataaaaatacacgcattcattatccataagtttgcacatttaaaatttcattaaagatagtaattaatttgattcatcatgcaaacaaatagccatacagcttaattttcgccaaataaatgcctttctatatattctcgtactcgaacatattatttttgctccggcaaaatctctatccaataaccatccggatcactgataaaatagagtcccatgtccgtgttctcgtagcacacacaatccatctgcttatgataggctcggacagcatcatagtctccgggaacacgcatacagagatgaaactccccttctcctagatcatagggttccttgcgatccctcaaccaagttaattccaatagaaaacccgtcttctcttcccccatatacaccaaaataaacgaaccatccgaagcctccatccggcgtacctcctttaatcccaacgcttcctcgtaaaagcgaatactcttatccaaatcaagtacattaaaattgaaatgatcaaatctaccctttact

SEQ ID NO: 250 - DNA, 6437 bp, Butyricimonas faecihominis
acgtatgagagaatttaatgtatattcaataagtttcttcatgtgcggtttgtaatcggccgaggcatccccggttgcccggttggcaatgatcaggcaaatcgtggtggcccggtggcccataagagcggctaggccggcaatggcggcactttccatctcgtaattgacgatcttgtaattcccgaatctgaaacgggcaatctcgtcattcactgtcggcatctcgatcggtaagcgaagcactcgtccctgtggcccgtagaatccgtttgctgtcaacgtgacgcctttcacggtaacgccttccgtgtgtaatttgtccaccagttcgtcagatgcttttaccgcgtacgggcgggctgctaagggtgtccagtgacactccttgataaaggcctcctcgaaagcggcatcacataccatttcgttatcccggtagaaacgcaataccccgtctatgccgaggctcatttccgagatcacgaatgaatgtacgggtacatctgcctgcacggaaccggaagtcccgattcgtactatatttaatgttttcttttccgcgtttatttctttggtgtgcaagttgatattggccaaagcatccagttcattcatcacgatgtcgatgttatccgcaccgattccggtagagataactgacaggcggtgtcccttgtaatatccggtgatggtacagaactcccgatcgcttttcctgacgtctattttctcgaaatacgaggcaatcatttctactcgggaagggtcacccacgaggatcacttgttctgccagatcttcgggatgaaggtggaggtgaaagacactcccgtcatcgttcgtgattaattctgatgattttattggctccatatactgtttactttttgagcaaccaaatttagtaaaacaaataataccggacaaatgtttgggggtttttaatcttgtcgctccggctggattaaaaagttacaggttacaagttaagtcttcgactttaaacctgtaacctgcaacttataacctataacttaaaagtccggcaaaaatggccggacttttatctatttcgcgtaatttatagcgcgtgtttctcgaatcaccgtgactttcacctgaccgggataggtcatttcatcctgaatctttttagcgatctcgtatgaaatcttctctgcttccgtgtcagataccttttcactaccaacgactacccgcaattcgcggccggcttggatggcgtaggtcttgaccactccattataagaaagtgccaggtcttccatctctttcaggcgcttgatgtatgactcaaccacttcccgtcttgctcccggacgtgcgcctgagatggcgtcacaagcctgaacgatcggggcgatcatcgttgtcatttcaatctcttcgtggtgggctccgatagcgttgcaaatatccggtttttccttgtacttttcagctaggcgcataccgagaattgcgtgcggtaattccggctcgtcatcgggcacttttccaatatcatgcaataatccggcacgttttgctttcttcacgttcaagcccaattctgcggccatgatggcacagaggttggctgtttcgcgagcgtgttgtaacaagttctgcccgtaagaagaacgatatttcattttgccgactaaccgaattaattccgggtgcaacccgtgaatacccaagtcgatggtggtgcgttttcctgtctcgacgatctcttcctcgatttgttttttcaccttgtttactacttcctcaatccgtgccgggtgaatacgtccgtcggtaactaattggtggagtgaaaggcgagcgatttcgcgtcttaccgggtcaaatccggaaagtacaattgcctccggggtgtcgtccacgatgatttcaacaccggtggctgcttccagcgcccggatgttacgtccttcccgtccgatgatacgtcccttgatttcatccgaatcaatatggaatatagatacggcattttcggtagcggtttccgtggccacccgctggatggtttttaccacgatctttttcgcctccatgtttgccgtcatttttgcctcttccataatctcgttcacgtatgacatcgcttcggtttcggcctcgtctttcaaagaactgatgagtttttcctttgcctgatcggcagacattccggaaatggcttccagttgctcgatctgttgttttttgaatttatccagttcggcgtgtttcttttccagtaattctttttgggcctctagcgtctcctgttgtgtctctgcgtctttgatcttgcgttgacattcttccattttacgagccaattcggcatctttttgttttagcttgttttccgcgagaaggattttgctattacgggcattcacttgtttttcgtgttcggcctttatctgcaggaatttctcctttgcttgcaaaatcttgtcttttttaattacttccgcctctgcttccgcttccttgatgatgtttttgctcctgtatttcaaggtcatgttgattagcaggtatccgagaacgaatcccactatcagagcaataacaccggtaattattattgttatcatattcgtaacttgaatttatagttatataatatattttggtgttttttgtttatacaaaaaacccgcatcatttcttctttaaaaaacccctgttagacacgggtagagctgccgtcagattcaaacttccaccgtcccgaaggaaccccgaagggttgaggcctgtctttggctaactaagcttcactctaattggttaagtgttgagttttccagttaaatacgaaataatgcgggtatatctatttccttttcaaagaactctttcttttttactctttcacaacttcatcgagcctgctattaatcttcttcacctcgtccaataccggctccacgtcgtttcgcctttcagcctccagcatctttaccgtgaattgtaacgcagtaacagctagaaaatcaacgggatcagcagttgcgtacttttccctatattttgcaatcttactattaatcagctgtgcagcttttctgatctcctcttcttcctctctctctatggtcagaacgcagggcctaccggctatatttagcgtaatagtaagtttatcattcatatttaattattcaaaagagcaatacatttatcaatctcccgcacaagttggcttattctatttttggcctcggaacttccctctccggtcgagatagcggcagccaccttcaatgtcttgatttcttcatgtaatttcatgttctcacttttcattcgctcgatttgaatcctgagttctttcatctctgaatccatctctctgtttttgtccagtgaggatatatatagttttatcagtcgttcaacttttgtgtttagctcgttaataacggcatcttgttttgctgtcataacataatctttacaccacaaagatagaataatttcttttaaatatcaatagtgttattaattttgcgatggatttaatggtttttttatgacaaacaagataatgtggagggggattggagcattgttgttgatgttacttcttttatcatcaaatgtttgcgcacaaacagacacgttgctttacccgttgaaaaatgttccgctattgagtggaaatttcggagaattgagagcgacacacctgcactccgggctggattttaaaaccggagggcgggaaggtctaccggtgatttgcgtgaaagacggtgtcgtggcacgtgtaaaggtgtctgccacggggtacgggaatgccctgtacttggaacacgaggggggaataaccacggtgtatggtcatttaagccgttttgtaccccgaattgcgaaagtcgtgagaaatatacaatataataaggagtcattcgaggtggacgagaatatgtcgggctatgaactccgttttcgtgcgggtgacacgattgcttatagtgggaataccggctcttcgggtggtcctcatttgcatttcgaggtgcgtgacacgaaaagcgagcgtgctttaaatcctttacgttttctttcggtgaaggatcaaacgggaccgagcgtgcgaggggtttacgtgtatccgatttcaaacgagggggtgcggaatgcaactcgtcgggtggaagtgaaaaacacgggtaaccgggtgttccggggaggaaaggtcggggtacccgccgggatggtcgggatcgggatacaatctgatgactatatgaaagattcttggaacaagttgggcgtgtatgacttgagcgtgagtgctaacggacaggaggtctttaaaatgaccatgaacgagctttcttttgacgagacgtttttggttaacgagttgaaggattttcatcattacagggaaaaccgtttggtttacttgactttcgggaactatcaggagcaattgttgtccgttcgtaatcagaacgggggatttatcccggttgagaaagatagcgtggtggatgttacagttgatttatcggacattaatgggaatcgttccagtatcatgttccagttatggggtaaatctccctcgcgggaattggtattgacggacgaggaaaaattattgatgaatcatcaaaacgatagcttgaaacaaggaatatataccctgtggttggaggcggatgctttatcctatccgatcgtgtgcaagccggaggtgtcttcccgcttgagagatagtgtcgagacgatcgaggtgttttctaccgggaaacaaatatacccgttgatgaaaaatgcccggttggtggttggcgggaagttcccggaaaagtccgtgatctgtttgctggagaaaagtaatcgttttgctgccttgaagacccgatggacgaaagaggggcttgaggcatttccccgggtgttgggtgaatacacggttcgtcaggacacgattgccccggttgttctttacacggggagggccgggcagaagatccggttcaagatggttgatgatttgtcgggcatctcttcttatcgggttgaggtaaatggaaaatggtgtttgttcacgtatgacgcgaaaaatcgcctgctggaaggtaacataaatgaacccgttttcgtgaaaggaaaaaacaggcttgtcttgaaggtggaggatgccgtgaaaaatattgctacctttgagacggatatttataaaaagtagaaataacaatgaatatagaagaagcaaaacaactggcaaaacaaggcgatcgggaaggtgcaattgccatgctccggcaaatgttggaacagaatgaaggagaacgggaactcgtgctgctggaactgggagtggtgtataatgccatgggggagacaacgcaagcgataaaccatctgaatgaggtgatgcgtataaatcccgaaaatacaaaggcgaaggcttatttggatatgattaacggaattttgaattattattgtaaggatttgctgaatccctgatttatcaccgtaattctcttgaagtaccggagtaataatcttgcgtgattctttcatccagctcttcacttcgttgctcgcttattgggaatgggttatgaaagggcgatggaagggagttggaagggcgtgaggagattattactttggtaaaagtctggtattacactgtctttaaactatgtcaatctatgcttctcttgattgtttgctgatagttcatttagaccacggagcattcatcctgcattcttcttgcattcatcttcgataaaattgatttttgagacgattgtatttgtaatttgagtgtgtggtgtagtatattagctatctggaaaaatagacttgttgggcaggtaaggaaagcgaagtctatgagaagggggggcagcggcgagcgagttccctctcccatcttgtgatggtatagattggattaatcctcttcttcttgtgccaattttattcctactgcgtttagcttcgcttcaatctcgtttgctgatacacgcccgcaggagcgtaagttttgtatttcgtatttggtgtattttgttatgtctttcactgtttttatctctgccatcaataaaacactcatagcccttgtgctaaatccaaactcccgaatgtttgttgccagtatttgttctattgttttggcttgtttctcctttttggttgcgtatccttccaattctgcaattatttctttagcctcgtttagaatcttgataagtctgttgattttatccttttccatgatgttgtgtatttattggatgcaaagataatttatttgtggtgaaaaatatccttgatagctttatttttgccttgtaatttgaattagtgaaagttgagaataaagattatggttatataattgatccagctttcactgttattataaagtaataagtgaagat

SEQ ID NO: 251 - DNA, 6434 bp, Butyricimonas faecihominis
agataatcgcaaaattcattcaaatatgttttcaaataaaaaaacatataactcaagagagccgtccaactggacgactctcccttgtatctcctcgaaaacaacacgaaagataatctattgaaaaagttcttctaactttttttgcaaagtttcacctctcaacttaatcgacaaaacttttccatttgcatctaacaaaaagattgcgggaatcgttttcactccataagcatcagaaatacctgaatcatccaagaaattcggccacgggagttgctcttcggataacgctttttcccacgctttttgatccttatctatagatatactaattatccccaatcccttagcagcaaaccggtcatatagcgccttcaaattaggaatttccttccgacaaggtgcacaccatgatgcccaaaaatcgacaagtatgtatttcttatttttttgtagctcttgtaacgtaacctttttccctccagaatcagttactgtgaaactcggagcattcttaccttcaagagtttccgggaacaattctttataaacgatttgcccgtaataacttttttgcacttctggggaaaaagcctcaaaccactctttttgatcttcctcaaaccaattcattaaattcaacatcaaaaatggtccccaccacgaatccttattatccaaaacggcttttgttatttccgcctcagccttttcaaaaaaagcagcttcatctttttccatctgagcataagcctctgtacgagaaagtgaatctaaaagaacttgctccttatttcctcgcgcttcccctattttacgattaatatccgcatgttttttctccttatcttcgtacaattgatccaattttgttctaaaatctattttctgaaggaattcgtcatgcaccggtgaaccagtaacctttatatctgaaaattctacaaacatttgaccattataatcccgcttttcagcttttccatgtatgcaaacctgtaatccattctctacaactacaggaattacaccattcataccttgaaccataacataatacaaacgaggggtttccacattccccgtgaaagaaaaacctccctttgtcatgattgcttcagccacaggcttttcttgtttatgagttgcccctggaaccaactccataatggtcccgtccgacaagccggtaatttttccttgaatagtaaacgaatctttaggagtacaagcacccacaattaatatcattccaaccaacaaaactaaaaaagactttctcatttcaattacttttataaaatcaacaatttaattatcgtttcacattctgttgcaaagttccattaccgggattactcgttgctccctgcgggaatggcattgtccacaagtgtgatgttggagaaagcgagagcattttcccgttaaactcctttgttaacgtccgggcatatttactgtcttggttcaaacgccgggcatcccagaaaggaattccagtctgcacgtattcattagccttctcttgaataatgtatttcacggcctcctcaacagaagtagcagaaagcggggtataataatctttaaaaatacgagtctcccgtaccgcatttaacgtctccatggcatcgtctaggttatcttgaccacccttacgagctaaacattctgccttgatataatacatctcaggcgtggacaaaccacccccattgaacttatcattacgaatgccataaaaaatatcgtccggagcttcatacttcgctttccatttagatgcgaaacgagcatccccggcctcaaacaaagcagcccgagcagttgtcaatgcaccggtcaacgccgactgtcctccattcttctgtgaattagtcccataacggaaaatatagttttcaggattcgtcagggaaatcgcagggtagctattagaccaatcatccggtttctcaatctgatctttattttccttataataatctctccaatcaaaaagtttgtcattacacttcaacgcctcttccgcattcactaaagcctcgtcataattctccattgtaagatacacccgtgccaacatcgcatacccacatcctttattcggatgcaggatcgtttttccttccttgggaagggccggtaaggcatccgttaaatctttcaatataaactcatacattttttcaatcgtaacttgaatggaagaagctcccatatcggcagattctatcaaaggcacagataattttgaagaggccgaagaagcattataagcatcagcataataattcgtcaggtaaaaataattcattgcccgcaatactttcgcctgcgcaattaactcctgtttctctgtcttggtacattcagtagcatcaggaacactattaataatcaaattccaattcgagatggcggtatacgcataataatatgccccttcatccgaattattttgcgcaatacgatcctcatcctccatccaattataattaatagactccagagacacgaaccccaatgcactaggctttacataggaatcatttaaaagattaattgcttgtgttatatcattcaaatgattcgactcgttacgaataaacgcatcaaaatcggttaacgttgtcgggatcttttctcctttcggcagaatattcaaaaaatcatcacaagaagaaaaaaacattccgatcgcaagaattataattcccgctatatattgtatttgctttttcatcgtatttccatttttaagattaaaaattcaaataaagcccgcagacgtaattcggtttatccttactccctaataaataacccgctttacgatcaaatgctattgttgccaaattctcaatattaaactgtaccctcgccccgccaaaacctattttcttcacccattcattgggaatcttataagtaagagaaatattactaatcttaatatgcgatgcatcccacacgtgaatatctgcccccttataaatggactctctatcgtaattaaaatcaggtgacgtatagaaaagcaaacaaggtacatccgtgatcttttcatctccagcctgtttccagcgcttacgaatatctttgctggtcatgtcaatgatcccgttactgtatggatctcccatattgattttaggaatattcgtattccggatcttatgcccgccagcataaagcatctgaattgacaactcaaaatctttataattaaacacattcgtgaacgaaccgctatactcgggaacagtcgttccaacataatgaattgcttctagatccgtgtaatcagtagtagtaatattaccatctttatcataaatctgtggctctcccgtctcactcaaaccagcccacttataagcataaattccattataagagtttccttccacaggatatgcctccggataatccagctgcagaaaatacacgggagcctccacgttgattttcgtaaccttattcttattatagcctaaaaggaatcccatgttccatttaaacgcagattctctaaacagatccccctgaagagttagctcaaatccccggttacgcatcgccccattattaaatgtaagcgttgaataaccaaatccttccgtgggtactcccatttgatttgccagcaaatccacactctttttgttatacacttcgaacgacccgaccaaacgattcgtgaacatggaaaaatccacaccaacattcacggttgtcgtcttttcccaccgaagattcggattaggtggagaagaaatattcccgtacaaaccgcccacgagagcacttgtataataatttgcagttaaataaggagctgcatttttagcgatatttcccccgattccataagaagctcgcaatttcaacatatctacccaagagcaattaaaaaaatcttcccggttaatattccagttaaccccgaccgaccaaagcggtttattctgatacttcgaattcgttccccacaagttggaacgatcccatcggatacttcctgaaagcgtgtaacgattatcgtaagaataagctccattcgaataaaaagacacgaaccgattcaccatctccctctgggcactaggagccgataacgacgcccaagtattcatcagcccggaaaaaccttgagttaataaaggttcatcaatatattgagccatcaaaaggtcattgtcatacccgtaacgggttagattactatattccaattttgtattacgtatttcttgaccaagaatccaagtaataccatgtacaccattaaccactttatcaacatttaactgttgacggaaattataagcattggaaaaatgattctgggtataaaatatatccccagccggaagattataaaccacattcccatccgtgtaagtagcaaacttattaatcattacacgcgtcgcataggaatccatttcttccaaacgttttactcgattcaccccatattcatattggaacatcgtgttataagttaaccatggcaaaatcttcacttctaactttgcaaacagcctgctcataaactctttcgtctttgtcaatcgcttatctaactctgccaatggagttatatccacgtcatacagcccgtaattttcaatattatcccgtaccgtttttttatactgggaaggcatcgtgatccagttcccatcatcatccttcaaacgatcgtaaggactcgcagtaaaaccggccccgtaagaattcaataaatcatacgtctgcgtcgtggcatttttaaaattaacataaactcctacatcagccttcaaccatgaaacaacctgcattgaattttgaatatttaaaccgatctgatcactctttgcatatttatcttcctctttattattgcgataactggccgagagcataaaattattacgatcggttgctttacccacacttaagttatattgttgataaaatggattacgtttagcatacttttctacatccttgtaatagctgtaacctcttgacgctaattcagacagtttagcatccgcttcggattgagtaattttattcgtatagagatcaagcaatatattaattcccgcactgggagatgcataattattacgacgattcatcgcctctgctagcgctcgatcaatcccattatttaattccggattttcggcagcccactgtttttctaattcaataatatctgctgaattcgtcaaatttcccgtgtaataagaataaggacgcactgtcaaaactccagacaattgaatttgtgttttcccctgtttggcctttttcgtggtaataacaattactccgtttgccgcacgagctccataaatagaagcagccgaagcatccttcaatacagttatactctcaatatcttccatatttaacactggagcattttctgtcacacttccactagcatcaatagaagtattttccacggggaaaccatcaatcacataaagcggagttttttgagcattcatggtcgatacacctcgaataataccatctgaatatccagcaatctgaccttccagcactgacgaaagattatccattcgtcgcatttccaacacctgtgaagacacttttgcaaaagccccagtagaccgttctttagaaatcgtttgatagcccgtcaccaccacttcctcaattgtttcgtcatccggaacaagcttaaaattaatcacgtcctgatcccctatcaccttctccaccgatttatacccaacaaaagaaacaacaattacattatatttttcatcaaaagtcaacgaataattcccattcacatcagaaggaactcctgtcgtcgtccccttgagccaaatattggctcccggaatgggttgaccattttcgtcaagcacctgacctttgatcgaacgtttctttttctcttcttgaaccacttttttctgtgtagcaggtttcaccaccacaatgtcaccttgaatctcaaacgtgtaaggttgatctttaaaaattctttccaaagctgtttttaacggtaaattctcgaacttgagcgtcacgttagaagctttctgaatctcgatctcgctgtaaataaaatttgccccagtttgtgtcttgactaatttaaaaacttcacgcaaaggcatatccttcacgtccaatgttacgcttttggtctgggccgaggcaaaattccacaaaccaaacagcataaacacccccaacagcaacacgttcttgttaattccatgtcgcaaaactgctattttcaagaaatgcagtttttttaatcgattttttttcataaaattgtactttaattgtttcgctaaaaagcaatgaaattaattacttgagcgggagatgttcgctgcatcttccgctcgttttataataattgttcgccctgatat

SEQ ID NO: 252 - DNA, 6428 bp, Butyricimonas faecihominis
acctagatttgatttattactaacgtaaatatcaaagtatagcttattgtcctgagttgtataaatgtttttcaaatatgctaccatcttattttttttagcgatatccgtcctagtgagagttgttttttctccttcgatacgggttataatgtttattgaacctttttttgtcgtgtcattttgccggcttatttcaatttgttttttttcaattgctttagctgtaacggcatcagttaatttgatgatataaacatatttgtctaatttttctacatattctatatcaaatgaatatatattatcatctttcgtgacgacaagcatgtttgttgtcgttgtaaaatttttactcaatctaagttttaaaagattcgcaactttaggatcgatttctactccaatattgtcatccattagccctaggtctacatgaataatgtctgcagggaagactatggaagttgttttgttcgctgtcccctgaagcttcaaaacttgagagaagatgttcccggataataatagcatgatgagaattagcaggcttttcattttatttttcttttaagtatagcacgtaattatttgtgagattaacttttatttcttgaatatctttagctgcaccgctacttacagcatcaattacaccttctgtcgcaacttctgcaacatcacctaaaattccaccgccaactactttcactccggatccaatggctgatcctattttttttactccacgggaagtcgaggtcttgctttcttttctttgaacggaaccaggaatatgtattccctcgttgccatcagtgtcgcacacggtgaaattgcaagctattaatttttgcccaacttgaacttgagttatttgaatttgtacccgttcttttactattttgcatataccatacgcgaaagtatttgctggaattttttgtccattcttaagttcaatttcttgaccgatacgcatttttagaagtgccccttggtaaacggtctgatttgcatggacgtatgtttttatccccgttacgctctgtaccggggtcttcgtttcactttctccagataatgaaattgaatggaatttcattttttcctcttttacttgtggaacttctggttcaatctttgattgtgtttttctaggtgtcgttttttttctttttttgatttgagagtgaagttctttttctccttctccattttctttttttatatcctggaatttctttatttggctactttcttcttttgtttgagtgggaatattatttattttttcttcattgggtgtgttatacgaggtatcaggttccgaaatatattctccgatattaaaatcacttttccgctttcgtttatatttatcttgtgcattttgatacgctttattaacatcggtttctgtttttgcgaaagtgtcgggaatgtctacatttattgcatccgtggaggatgataattggtcatcattcttatttgaatcatcgaatatgatagtaatagcgatactaataattataagcattaccggtaagaagacgaataaaagaatcttttgtcctttgtttaaatttctcaagttcatattatcttcgtttataggttttaatttctttgttgtcaaggatacggaattgttcgataataaatccatgggcatttttaggagatctacttcttgtatctcgcaatacacctgtcgttactaggtttttttccatgattgcatcggcagatattatatataattttccccatagtaccgctttgtgaggattttgttttgtgacttttatgctatcgattacaagattttgagttaaatttctgactgtaatagaattaaaaaagtcttctgcaacaagtttatcgtaatatacttttcccgaccgatcaattaggtagagagctaaattttcaatgttagttttatttacacttggatccggcgagagattaaaaaatagctggtgaaacttttcaaagtgggcttccgcttccgcttctctattttcttttactcgttgaaggatgaaagcgttattggtcggatctagtgcataaatagtatccttacttttgttcatttcgttgagcattactaaaacaattatagatgtacttagtattgatgctatagcgattaaaaccgctataattgtgatttttttgttttgtctttcgacaatatttaatagttccataatagattaaattttatctttgagaatgccgatgtctctaagtttttgagctattttttctgttcctgtaataattgcttgacctgcggctgttttacctgccattcgtcccgccattcctcccattccggatatagcatctccccccgctcctagtgcttttgaaccaccggtaagaccttgttgcatcatcatagttcccattgcgttcattactgtcatgattccaccaccagaggtattaattatccacgaggctatagatggtactgccatatagagaataattccaacagccataaagccggtatatgcaactcccccggagaagtttgaatcaacacttataccaccatattgttcaaaattatccaaaatattttggcaccttacgatatcttgttgtagaactagattttctatacattgtaggacccagctgatcactcttgccacgggagtaaataattgtacccaaatgtattttgataaccaatttttccatccatcggaaaaaatggggatagcactcatggcgataacaataggtcctaacgtgtataatataaggtttaatgttgctcctaatatacgtgtaatgaaagatgcacaaaataataaagtagagagcatcgttgaaaccaattgatctttccatttcactagattgttaacttgcttttgaaagaatcggataattgcatttgaaccgggctgtcctttcaaggcgtcaattttcttatttatttctttcaggatcatctcttttttttctctttttatttctatttcatcaagagttgaataagacattcctgccataattgcatcaaatccttgtacacaccaatctacactatgagttaatggtttataagctgaaacaactagggctaagataaacggtaacaaaatggaattgaggtcgattacttcacctttgtgcatagctttcattgtttttgtaattataatgattaccgctcctatacatatcagtaaggtcgtaaatgaagcaaacatatcagatgcttttccgactgatgaatttttaagttcacgtacgattttatctacagatccaataaagttctgtgcattacttttctcttgctccgacaccacgggattcgtagaatctgtgtaattttcttgtgcagatatgaagcaagtagttgttaatataaagattatcaataaaaatatttttttcatgagagggatggtaacacgattaattcaataactccgcccaacatagcgcatataataataccagtaatccaagcgatcatgtatttaactaagaaattctcttctccaagaaaatatatttttccgatagcagacgtcgctgagagaagagcaaatataactaagcatatccacattgtatttttgaaattaattaatgccgatttagcggaagtcatattcacattaaatttttctcttgcagaattttcatccagttgatcaaatgtataaatgctattaaagaatgcagaatttagttcatgcatatatttatttccatatacttctgccaactcttgcctcgcctgatcttccatttcgtcaatcatattttcgatatcgatcacttttgcttcggctttatttaattcttctcgttgatccttgtaaattttagatgcattactgattatctctgcaacttcttctaatgacgtgagagcaatgtcaaatgcctgaatcgctctaatcatatttgcagaagtccaacctttatcatttaattttcgatatgcatctctagtacgctcacaggcttgaatcgccttaattgatctattaattatttttgctttctttgctatatttgatgctctttctgttaatgttccgtctttagcttcctttgtagcttttaatatatttgcgagaacagcagtcattttatgattgtaattttggttggcaacaattaattcgtccattttcaggtttgttatacccatttcggcagctactccttctgttccaaccataggtacagcagcgagtgctttattaaccccggacatgagaattgttgtcaattttcgttctgccagagataaagcataccgggaatccattgcggataactttttccacgtgaattcatccggatcaacatcttcatcatctcccaaaacctgcgcttgaagtgatatgccactacccagcatgattaaaaatatgagaacctttttcatagttgtctaaaataatatttactgcattgtcaaaatcgcatggatgtttatgttgatattgctcaatatctttcatcatattctctataatgtactttatcgcatcacaataatttatattgaaatgatgggcaacttttttaataccatcctttatcggtttatcagaagcatacagtagagcctctgcctggctaactcctacttcatacacgtcactcattccgtttgcgtaacagataaagaagtctttggatttatttcgtggatcttttcctttattcagagatagaacttgacatatttgaaagtgattgagacccagaaatttcttgataaaatcaaaattctctgaaaattttgattgatctaataaaattttagtgtcacaattgttgattaatgcctgtccaactatttcattagcgataatatcattaagttcctgtgtaacgataattagttctgaattgtatttacgtccggtttttgctaaatattttatattctcgctcatttctgcatttgaaattgcctgccatgcttcttcgaacacgataactttttctcccgcttgattatacatttgggagatataggtatccattatcatcgccgcggtgatggcaaaaagtattttatttcccttgatactgtcgagttcgaatattgtaaacgtttcgtttacaagtgaaacgttttcctctgcatttaataaatttgcatacggaccgttgccgtaatatggagagaggttcagtatgaatttttctttattaaagtcaacttctgccggatactcgtatgtttgcgcaaattcataaaatgtgttgaagttccgtggcgatattttttgtagataatatgcatctaaaaggttttgaacaatgacattttcagtttgttcaaatttatcatcatcaactccccgccagagtacttttataatagcaatcaaggtttgagccttttgatcgcttaaacgtttatttttttcattccaatcaaattctgataggataaatggattaaatgataagggtttatcttctgtactttcaatccattttccacctaacgcattacagataccttcataagatctacccacgtccacgattaaaattgtcgccccacacatacgtttatgatacaaataatggttcatggtaaaggatttaccacttcctgaaccacctaaaacaaatttattcttattgccaattaatcgtcttctgtatggctcgcaaagatcaacacgaataggactgccagaaaaccgatcaatgaggcgtaatttttgttcatcttgatcaacagaatatagcccgtcgtaatttaagaacgcggctcctactctatcgatagttttaaaccggtattcattaaaaatattaatacaattaccagctagtgatgctataaaaagattgaacgtattctgactttctattttcgcgttagcgcatcccatggagttcaacgtggtacatatggtttctcttttttcaactaacttttctttgtcttcatcccagattatgatattcatgtgacaatttacgatggatgctttttttgattgaacttcttgcaagaatagttctatattttctaaaggatccgtgttacggagagattgcatccaattccgttttgtttctagtcgattaatctctttgatagtatcaccttttataatataactattgacaatatgattaaagcgaggtattagtgtgatacttccgccccaggatagtgataatgatatatcttgttctgaatttgccgtgtatttactgtattccatctgttgcttcatcgctgatggagcttgctcaagagttgagagagaaattatttctaccctttcattaccaatttttagttgtcgttcttttctatcgtatattatatcactgtaataaggatgatttaaaaaaagtaatttagtagcaacactttcatgtttattatttac

SEQ ID NO: 253 - DNA, 6412 bp, Butyricimonas faecihominis
ttattactttcattcatccctctcgttgtttagtggtgtctatatataaaaagagaaaacttatgacgcatagtagggctcaaatgctggcgcggataattatccgtgtgaaattaggaattgcttctttggaagaaagagagaaattgttggcttggttagatgagagcgaggaaaatcgtcaattacacaaggatattattcggggtaaatgtatagcggaaaggttgaggcttgaagatgagattaacgagacgactgattttaaacaagtatacgggaaagtttataaacgtttaacaacgagaggtgaaaaacagaagttgtttattcggataggtataggaggagttgttgccgcatgtctgtgtggtgtggcattagttatttcttcattatggttgggaaaaggaaaagacaggatagaggaaaatattgtttctaccgtgcgacatgaaaaagtgatgttagtattggaggatggcaaacagattggattatcgactggtgttccggatcgaattgaccttgcgcaggctactctggtgggtgaggtcgggagattgtcatacgagccaagaccggattctatgtcattaagggaagttagacacaaaatatacacgatggcggggggagattattcattagtgctgggtgacggaacgcgtgtgtggctaaatgctgaatcggaactggaatatccagtacaatttgttggaaaagaacgagttgtaaaattaaagggggaggcttatttcgaggtgatgcatgattcggtcaaaccgttcatcgtggaggcagccgggactagaacccgtgtcatggggacatcttttaatataggagcttatgatgatgagaatattgtttataccacgttgctatcgggaagggttgaggtgagtctgacaggaaaggatggggtgaaacctataattttaaatccgggtgaacaatccttgtggtcaaaaggaaagggcgagtttacgatgaagaaggtaaacacggaggatgttattgcttggcggtatggaatttttgtgttcaacgaggatgacatagagatcgtaactcgggttttatcccgctggtacgggactaaattcgtatttgacagagaatgcacgggaaaacattcgtttagtgggaaaatgagtaaagatgagaaactcgaatctatattgaaaatactgaccttggccggaggaccggaatttaaggttgaaaaagatatcgtacatgtaattgaaaaataaaaaaccggaaatgttttgccgacatttccggtgtgattcaccttgttgagagcaaggtttgtgtttaatataaaacgtaacaaagctatgaaaaaaaattgcaagacaaaaacgttttgtagactttcggtgatgtgcatctcgttgttatgctgtatcttgatattcggtataacatcagtatttacaacttcgtcagcctacggacaaaagacgacaccgcgaatatcggtgaagttggagaatgttagtgttttagaggcccttcgggaaataaacaggttgagtggtaacgaagttgtttataaaaaggaagaggtggagaaggagacgaaaaaagtttctgtgacattgaacaacgtgacggttctttcggcagtggccgcttgtcttaccgatacgaagttatcatgtgttatgagtgatggaaaagtggtggttgttcctgaaaaagaacaaaaggctttggtcgtgactggggtgattaaagataaggcgggagcgcctttaccgggagcgacgattgtcgtgaaagggagttccgtgggaacgagtacaggtgttaacggagaatacaaaattgttcttccatcgagtgccaaaacattgatttattcctttatcggttataagtcagaagaagttgaagtgaatggacgccagaagattgacgtgatcttagaagatgatgtgaaaaaaatggatgaggtggttgtggtcgcttatggtacccagaacaagcgggatgttgtgggagccatgtcgactgtaactgcggaagaaatcaaagatattccttctccctccctagctaatcttttgcaaggacgagttgccggaatgagtgtgattaacatgacaggagctcccgggggaggtggaacctcagtttctattcgagggtttaatagtttgtcggtcgaagccgcccagcgttttagtaatcccttgtgggtgattgacggggttcccatgtatagttttacttctcctgtcagcgggttgaacacattggcagaaattgatccgaaggatatagaatccgtacaggtgttgaaagatgcagcctcggcttcaatttatggttcccgggctgcaaatggagtgattttagtgacgacgaaaaagggacgttacaatcagaaggcaagggtgagcgtgaacgtgtcacaaactttggtgtttaatcccgctttaccggatcttacgggaggtaaccgggagcgctatcatcgaatggaagcattgagaaactatcaagaggcaggttttagtgacgaacaaaatcgttacttgtacgtgaactcgtaccgagaatcttatttgcgggatattatgtacgattatttttggggtaaaggaaatggtgcgggagttgtcctatatcaagatagtttgaatgaattttacaataattctacgaatttgtttgattattatttcagaacggcccgggttacggatgttaatttacagttaagcggtggggcagaacgagtgacttataatatcgggttaggatattacacggaaaagggagtactgaaaggaacaggttttaaccgcttgaagttactgtcgaacgtaacaattaaaccgatggagaagatgaatgcgaatttgcgtttttatctcgctcgaacggatcgcagtcgttcatcagaagaaatgaacactctttcgtttaatacgggtacggatttggagcagattccgaaagaattattgaaaacgtccacgctttacccggggaaaggatccgctgcttttgatgaggcgactaaacgtttccgaggcacgaaagaaaagaatgattcttatcgtctccgggcgagttttgatgctaattatgagttttttcacggtctgactttcaagacttctatagcattggattattcccagcagaatttgaatgttttcttgccttcgaatttaaatgattataatgaatctttttcacaggggcagattgagcggaatatgatgttgttgaacgagaatctgttaacgtacaaacgttcttttgccgagaagcataacgtggattttcttgtggggctgtccacccagtctgatgaggcaaatgtgctggggggatacggctataaggctccgagtgatttgattcattatgtaccttggtacggaaacgtgtatgatgttacagctgatcgtactctaaaagattatatatccaagcgggagaaaagtacgatggtaggggtatttggaaggtttaattataattatatgcaaaaatacttgctatctttcagtataaggcgagacggtagttctaagtttggggaagatgtacgttgggctactttcccggcgtatgctgttgggtacgctttttccgaggagtcctttatggattggtctagagatgtgttggattatgcgaaaattcgagtaagttatggaaagtccggcaaacagttttctgctccttatattgcattgggtttgttagaaccttcggccccgtttttaggtaatccaacggtgacccccgaatggacggagggattgtttaatccttcattaacatgggaagagactgaccaatacgatttcggggtggacatggatctttttaattaccgtttaaatattgtactggattattattatcgctatacggataaattattatacaacataacgttaccaggtaattattctggatacacgaagcaatggcaaaatgcttacgcaatttccaacgagggtatcgagttacagattaaatgggatattatgcgtaaagatagttttaaatgggatctgacttttaatattgcccgtaactggaatcgtttggagaaaagctataatggtgtggattttcagacttatggtgatgctggatattttgatagtaatgtgagtattatcggtaagccgttgaatggactttacgtgtataaagataaaggttattacaatagtgatgatgaagtcccttttatttttgagaatggtcagaagatttatttgcatggtaacggttatcgtcagttttatcgtgcaggagaccggattatggtggatgtagatgggaatggggcggtgtatacttcttggccattacaagaagaccgtgtgtatgcgggttctcctttaccgaaagccagcgggggaattatttccacgttgaactggaaaggttttgacgtgaacatgctgtttacttacgtgattagtcgtcatattctgaatgccggaaagggcgcttctgtggggacgagtttgggattaaccatggatgacttgaccattcctgtttttgcagatctggataaggttactttctggcaaaagcccggagacaagacagacttcccgatgaatcgtttggagagtgggttaggtaatttctcgactattttaagttctaacgtggagaatgtgaattatctgaaattgaaaaccttaactataggttatactttcccgaaagagtggatgagccgtattggtatggagagtgcgcgagtgtttgtttcgggggaaaatttgttcacgataaccaattattccggtccggatccagaatctgttgacgtggttaccggggtggataattttgggaattacccgctcagcacgcgtatcacattaggtttaactctaaatttctgatgtttatgaaaaagaatatattattagtgcttgttgtatttttatgtggggcatgttcggattttttgaatatgcctcctaaaaatacgaaagttgtttatacgatggaagatgtacgaggggcaatgtctaccttgttgtttgcaactacttcatcaagttattgtaaaggatacgtaagtagtccggttatgtttaacggtgagtacgtacaatatccctttacgagacgtaacaatgtttcttctattttgtatacaaatgatttggatttggaaaatttcttgtttgatgattttgcgaatccgtctcgagggggacagaactttattaaagagtatggagagataaaaaattgggaaggatatttattcccaagcgatctgtggaaggaagtgtttgtttcgataggttacatcaatatggtcttgaaagatcttgaaaatgtaccagattataacaaaacagattatgaacggatagcaggagagggtagagtgatgcgagcttattatttgttgagattgaatcaattatttgctccttatgataaaaatgactatggtatcccgtttaattttgatgctgatgttgtgcaaggaggaaaaagatggaaacaaacagatttgtataagaagttgatcggggagatcacggatgttctagaatatgaaactgttccagaggagtcttggaatatcttttttaacaagagaattatgtatgcgattttagcccagacttatcaatttaaagccgggtcttgtgctgctgaggaggaagattggagtaaggcagaattttatgcaaaggaagcgaggaaaggagctcgtgtggaaagtactattgacgagcaagctgaattgacaacggtgccattgacgaaatccacgacaaagcctcatagatttgctttgttacgtttctctttatatgcttacggtgggaatgattatgctccttggggaagaccggaacaaatgttggttcagcgtccttccaaagaattgtatgacctttatgatgagaatgatattcgtcgagaagtttattttaaagagatagatggtaaagtatatgttacaaaatggcaatgtacagatgaacatgatattaatgatgtacacattcttttccgtttttctgatttattattgattgaagcagaggccttggctagacaggggaaagacggtgcgttagatttgttaaatgaattcaagagtagtaaaattccgggatattctggttatactggtagtgatattatcggtgaaatattaaaagaacgtcgtaaagaatttgtctatgaagaacagatgaattggttggatatgaaacggactggggctagtgtttcccgtacggcaaaagatgaagaaactgatgaaatcaagacctatacgctggaaggtaatgactatcgctatacattccctcttcctgctgattatgaattgatgtataataatgttccccagaatcctggttggaagtaatgt

SEQ ID NO: 254 - DNA, 6402 bp, Butyricimonas faecihominis
atttttaactctccctctgtttatagagggagtacggcgtagccgggagggagtttaatctaaaatcataaatcaagaaattagttgaatctaaaatttaaaatctaaaatggtaaaggtcggtttgttatcagatactcacgggtggttggacccgaagatcgtggagtttttcaaggattgtaacgaggtgtggcattgcggggatatcggggacgtggcgatcacggatgcactggcgaaacggttcacgttacacgctgtgtacgggaatattgacgggggtatattacgccggatattcccggaaaaagaggtgttttattgcgagaacgtgaaagtggtcatcactcatatcggaggttacccggggcattatgaccggaagatcgcggagacgttacggcgggaacgcccgcaacttttcgtgtgcggtcactcgcatatcgcaaaagtgaagtatgatcaggcattgggatgcttgcatatcaatccgggggcagccgggaaattcgggttccacacggtacggactgcggcccgtttcgagattaacggggaacggattgaaaaccttgaattgatcgagttggaaaaataaataatttaagagtctgttaggacatttaatgctttctgtttgttacatttgtgcaaattacacgtagaataggaagaacataaagtatataataaagtatgaaaagagtattactatcggcggttgcattgctaatcgcctgtttgagctgggaaaatgctgacgcacaacggaaaccccgtgaggtgcaggaacaagcgattaagtaccagcgattaatgcaaatgattgatgccgcttacgtggataccgtgaacctgaaaaaattgacggaagatgccatcgtgaaggtactggcggatctggacccgcattccgtgtatatttccaaagaagaggttgaagaggcgaatgaaccgctggacgggggctttttcgggatcgggattcagtttaacgtgcttaacgatacgttgctggtcgtggatgtggttgccgggggaccttccgagaaggtgggcttgctggccggagaccggattattgccgttgatggggagaatatcgccggaatcgggattagcaacacggacgtgcggaaacggctgaaaggagagaaagggtctatcgtgaaggtgaaagtgaagagaggcggtgagatcattgatttcaatatcacacgtgacatgattccgatttatagcgttgatgcctcttacatgatcgataagaatatcggatatatcaagattgcccgttttgccgccaccacggtggaagagtttgaaaaggccgtgaccgaattgaaagcgcagggtatgaaagacctgattatcgacctgcaaggaaacgggggcggttacatgggtgccgctatcggtttggccgatcatttgcttgacggggagaagttgatcgtgtacacggatagtcccgctttcgggcgtatgggcgagtcgtccacaccggccgggttgttccaagacggccgggtagtcgtgttgattgacgggaactcggcctcagccagcgagatcgtgtcgggagcggtgcaggattgggaccgcgggttgatcgtgggacgtcgttctttcggtaagggacttgtgcaacggcaattcccgttgacggacggttcaatggttcgtctgacggtgtcgcattacttcacgccgtcggggcggtgcatccagaaaccttacaaggggaaggattatcaggccgaagtgttcgaacgatataacaatggagagatgtttagtgccgatagtatcgagttgacggattccacgaaatattacacgaagaaggatcatcgtctggtttacggtgggggtggtattattcccgacgtgtttgtaccgattgacacggggatcaattacagctactttaatcgtttgctggcaaagggcgtgatcaatgaatatgtgttgaattacgtggataagaaccgggaatcgcttaaaaagaaatacccgaagttcgagatgttccagaagaattttcaggtaacaagtgatatgattgatgagatcgtgaaaaacggcgagaagcaaggcgtgaagaaggacgagaaacttttcaccccgatcgtgccggaaatcaagttgttcgtgaagtcactaatcgcccgtgatctttggaatatgaacgagttgtaccgaatctctaacgaggagaacaagatactgaaagctgccgtgaaggcattgcatgacgggacgtatgggaagattatcaagtaacgggacgttacttgataagttgcaggttacaggttggcaggttacaggtttcggggatttgaatatttgggtctcaacttgtaacctgttaatttgtaagcgaattgaaaaagttgttttttagttcatccctttggcctgttttttgttgcaaatatttattgatgttaacagttatggcgtgtgcagggtagttgaacctgtaacttgtaacttgttaacttgtaaccgaactgaaaaactcgtttttcagttctaccatattaaccttaaatttagtggaatgaaaaagtttttattagtggtgcttgccatggtcatgttaggtagcgtgcaggcccaaacgtcgtttaaaaacaaggtggaaggtttaaccgggacggaattttattttggtccgaagttcgggtttaacgtggcaagtatcagtgacggtttgaacaagagtaagtttagtttccatctgggagcttttgccgagtttaaatttaatgatcttttcggtttgcagacggagttgatctattctcgtcaaggagataaaggaaagtccgggggtgtgaagacatgggcccgcgtgaattatttgaatattcctgttttggctaaattttatgtttgggaaggggttagcgttgatctcgggccgcaactgggttttgccttgaatggtaagagtaaaacgaaatccggtggtacggaagtaaaaacggatattgatcatttgaacacggtggatttgagttttgccatgggattgtcttacgattttaatatgggattggtggtttctgcccgttacaatttggggttgacgaacgtgatcgagaaagataaattcggtggtaataaccagaaccgggtgttccagttatcagccggttggaaattctaggtgtttatcgtagaatatagaaactcgtaagtttcatgacgtgagatggatgagttttattgaaaagaccgtactttgaatattcaggtgcggtctttttatttaataccgtattgttgcttgtaagtcaacgggaataattaatatgactgattttgaggctcggaaggtgtgatttaggtacgaaactaggacttgtttcgagtattatttaacgaaggtttatagagatcgtccaaaacgacttttagaaagccatgtgcaaagaacaattactatcgtttaaccattgattacaaacatattaaaccttatgacaacttttttggtaattaaaagaaaataactacatttgtaatatcaaaaaaggttcgtttaacgaatcaaaaaatgatagtgtaaagtggttgtcagacccgtaaagtggggactggttgcagggactgtctaaatatcgtttaggcagtccttttgctattgtcttaataatttccgggttaatatttccggggcttggaggtgttccgggaggtattctgcttggttggcccgggagggacagatgtcgatgcccccgcggcgggtgtagatacaggataccgcgagaatctccgggtggaagaggtcccataagcgtttgtaggtcatttcacatatttcttcgtggaaatggttctcgtttcgtagggagacgatatatttcaagagggaggcatgatccggtaggcagtcggcttgtatgtggatgtagatgctaccccaatcgggttgtttcgtgatcttgcagttactccgtaacaggtggctgcataccttgatttcccctcttccggttgtccggctttccagtaatgccgggttttcactgtactcggtgaaggttgcctgttcgatgccgggcatggcttccagtagcatgtaatcttgaaaatcgaaatacggtttttcgggggcttgacggaaaaacgtggcttctatacgggtttgcagtatttgttcgaggtccgatttcacggtttggaggtatgtttctatgcctgatggaatgtcttccccgaggcgggtcatgtttaaggaattcaagtatagtttcagcgatttactttccacgatacatgggctgttggccgggtaaaccagttttagaaccccgcacacgggtaagccgtttctggttaagaatccggcctcgtaggcgtgccaagtgtcgaatccccggaataattcttccggggtatgaatatcgtaaatctcccggtttaggctacgcgggaccggaacgagaattgacgggcaataatcggtcgggtaggcaacttgttggccgaggactttggattcaatactcatgatcagaagttttgcatgttgtataatttcgtgtagatgccatccagagccaacagttcttcatggcgtccccgttccacgattttaccttcgtggaaaacgcagatcatgtcggcgttgcggatcgttgaaagacgatgggccacgacgatggaggtgcggtttttcatcaggttatcgagggcctcctgcacgagcttttccgactcggtgtccagtgcggaggtcgcctcgtcgaggatcatgatgggcgggtttttcaacacggcccgggcgatgctcaagcgttggcgttgtccaccgcttaatttgcccccgcggtccccgatacaggtgtcatatcctttctcggtttgcatgataaactcgtgggcattggcaatccgggctgcccgttcgacctcttcccgggtggccgattcgacgccgaaggcgatgttattaaagatagtatcgttaaagaggatcgggtcttggttcacgttccccatgagttcacgtaaaccgtgtaacgacacgtccttgatgttgatgccgtcgattaggatttcacccttgatcacgtcgtagaaacggggcaagagatcgacaaaggtactcttcccggagccggattgtccgacgagggcaacggtctgtccttttcctattttgacattcacgtcctttaggacgacgcggtccggacggtaagcaaaactcacgttgcggtactcgatctctttattgaacccgtttaacggtttcggttgttcgggttccagtatggttgattcggcatttagtatctggtcgatacggtccatggcggcggctcctttctgaatgctgtatagtgccgtggagaattgttttgccgggttgatgatcgagtagaagagggctatataggcgataaagcttgaggcatccatgagaggtgtctgcccgagaataagaaggcctccgaaccacacgacgattaccacgacgatggttccgaggaattcactcatcgggtgagcgagtgaacgacgccacatcaggcggttcatgatttggcggtactgttcattatgcgaggtgaataacttatccatcttatcttcggcgttgaatgccttgatcacgcggaggccggaaagggtttcctcgatgttggacaggatttcgcccattttgtcttgcccttccttggagcgctttttcaaggtctttcccaccttaccgatcaaggtccccatgatgggcagtagtaccagcacaaataaggttaattgccagctcataaagatcattccggagaggtagatcaggatgatgatggggttttggaagaacatttccaacgagttcatgatggagttctccacttcttgcacgtcacccgtggttcgggcgatgatgtcacccttgcgttcttcggagaagaagggaagaggcaatgataatatcttttggtatattttccgacgaatatcccgcacgacaccattccggatgaacacgatctcgtaggaggcgagataggagaatcccgttttgaataatgcggctagtacgaagaaaccaccggcaaatagtaaggtggtcgatgcggaaaaatgttgttttgatagcgtgacgtaatagttgaagttcgtcatcaagctctccttgtttagttcgaatggtacgagttctgttacttcttccgtcacgttgaaaaggatgtttagcacgggtacgagtaacacgaacgaaacagaaccgaatgcggcggaaagaatattgtagaagatgttttttccgagtctggatttgtaaggagggatgaacctcttcaaaatttgtatgaaatcacgcataataattgaaaattgaaagttgaaaattgaaaatgagaatag

SEQ ID NO: 255 - DNA, 6388 bp, Butyricimonas faecihominis
acctattcttatgccaaacgtgtatgattttgcggtagggtaggtgctggcatcccgtcctcccccgatcacgcttcccgggtcatcgcttacttcgggatctggtccgggataagaggtaagtgtgaacacattggttgccgttccatatatggaagcggatttgatcttgactttttgacagatgcttgcgggaagattgtagtttaacgtgagtgttttcaattttaaataagaagcatcatacacgtttaaacttgttagcatatatgtggctgcccacatacttctcgggcgattggaggaggtgttcgtttcgctgtaatggtttaatactcgtgtaccccggttggctaaacttgacatgcctgaatcgctcacgtctttttggtatattaaatcgttaccatacgagaatgtaaatagtgcggttagagtgaattgtttccacgtgaaggtgttcgtgtaaccaccgaagaaatccggtgtcgaacgtccgatcacgtcttctttccagtagccatcttcatattcgaaagcgatgtctcccaagtctagatagggatcgaaactcgtgtagtagggaaatgcctccttggcggcagccagttgttcttctgtttttatgatgcctgtagctacccgtccataaagtagtcctaggggttcgccttcttttaccacgctggttcccaaattcaatgcatcacggttattggggtcggagaagggacctccgtttatatccaatactttagatatattccgggagatattcagcgctcccgtccagcggaaatgctttttacgaatgaaatctccatgaatatcaaattccaccccttgatttcgaattttggcaatattgaatacaacagtcgagtacgagctacttggggccggggtcatatttaataatgcgccatcagttaccttgtggtaatacccgaatgttccgcccaaacgtccttgtgcgaaagagaagtcaatcccgagatctttttgtacggtggattcccatttaatgctactatttccgagttgcgaggggattaatgcgtttttgtcaccatacgataccggtgtgtaaagcgtgcgccacatgtggtctccaatactctgtgttccggtttttcccatgcttgcacgaatttttatttcatcaatccactccgctcttttcagaaagttctcttccgatattctccatgcaatagctcccgaggggaaaaatccatactggttatccggggcaaatttggaagatgcatctgcgcgtcccgtgaatgtgaataggtagcgatccttccaaacgtagtttgctctggcataaaatgataataacgaattttggctctccggggtagctccctgtactttggatgcgtgagctgcagaactcaggttgtttaattgcttgtcatccggataacccttgcccgcggctgaaaagaaatcgcttcggtgttcttcccatgaagtacctaccaataaattgaaacgatggttctcgtttatttctttgtcccatgtcaatgtattttcgaaaaatatatccagtgttgtcgaatgggattgagatccggttccgttttcagaacttgtttttcccatgtaattacctatatccacgtaacttggagtatagcttagctggttgtaactgctataattgattgaaaccgtacttttgaatttcaaatctttcaggatacttatctccccggcaacggatcccatgaaagtgtatgtctttgcttggttcgtgcaggaagctactgccagagggttctggtaaccttgataattgtatcctaattcaagtatagcgtatgtaccgtcttcgttgtatggggcaaatgttggaggtgcgtataaggcctgtccgtagacaccgttagtaatgttggatttcgtgtacccgaaattcagattggtgtttaacctgaaatacttggaaatatcactgtcaagactgatcttaccggatatccgttggaaatcggttttaattaaggttccctcctgtccggtgtaagatagtgacgtgtagtaacgggaattgacacccccaccggcaaccgaaagatccagattttgggtaacccccgtgcgtagcacgagatccagccaatctgtatccgtgtcaccgaaataatccgggttgttcaaaatagcttgcgcttgttccacgtcacttccggtcaaaggttctcctgctttttcacgggcatcgaggtacgtctgggctgcttcctttagtgtcgatttatattgttctgcgttcagaactttttctttgttcggggtggaaatcccgatgtaataattcaggtttaattgtggcttactttctttgcgtccttttttagtcgtgataataaccactccattagcggctttcgacccgtaaattgccgttgcggatgcatctttcaggatgtcgatactttcaatatccgcgatgtttaatccggataaattatttaatccccgtaaaaaagcaccttgaacactgttattgaagtcttccccgtaattattagattctatcgggttaacaatatcagattctgtgatataattatttgacacgaccatcgggatcccgtctatcacgtatagcgggtcattcgttcccagcaacgacgccccacctcgaatacggatacgtactgctccaccgggagagccgtctgccttgaccacggataccccggaagccttaccggctaaggcatcatccacgctaatgtacgggacatcttttatctcagatactttcactgtagataccgatcccgtgaagtcctttacccgggttattccgtatccaaccacaaccacctcgtcctccactttcacattttccttcatgacaatattaatggtatctttgcccgtgtaaggaatctcttgtgtttgcatcccgacaaacgagaatactaggataaagttttcaccgatgctagtgggaaccgaaaggctgtatgtcccgttcactgcggttgctgttccgcgttcggtcccttttatctggatcgtcacaccgggtagctcttgtccctgttcatcgcgaacttttcccgtgattttgatttctttcacttgttgtgccgtttggctttttaatttcggtgaaatgataatcacgtcgtcttcaatcgtgtaagccagtttcgacccggcaagaaatacttgcaggacttcttcgatcgtggcatccttcaaatccatctgttttgccggtaattgtctgatttcttcgtgattgtaaagaaaacggtaatgagtgagtgcttttaactgctggatcaccatttctgccggaatccggtctgctttgaaattaatccttcccgtttgggctcttccttctgcaaatgatgcgagggtgaaacccatgatcatgataaatgttagcttcatgattttgtaacttttttgcaacacttctcccgttaagtgacaagtgtttctgttttttttcataactttgtcatttagtaattcaacttcgtttgagttttgccggagtaggggtcgaagtcttctccggctattttattgttttagaattttattccggtgtgatcgtgattgttttcccgttgatcgagaatgatatatttgtcgttaattcaatcatgcgtaatactttgtcaatcttttcatatctgtcaatttccccgctaaaatgtaattctcttgctcgggttccgacaaagaaaatattcacgtcataccaacgtcccagttgagccataatgtcttccagtctctcgttggcaaagagaaaacgtccgtgacgccacacgctttgttggcgtgcatttacttttacaatctccacgtccttcgaggggtttaatattgcttgttcgttcggggttaaccggaattctttgtcatcaacaaataaaccgatagaaccggtttcgagcgttgtcttttggaatgagtcatccgggtaggcttttacgttgaaggttgttccgtatacccggatagttgactgggatgttttcacgaagaagggtatttgatcgtcgtgttgtacctcaaaataagcctctccttccagttccacctcccggttggtaccggagaaagaagttggatattttagacgggaatcagcatttaaccagattttcgtaccgtcggccagtacgagagagaattctccacccttgggaaccaccagagtgtttattgtcggggctccggtaactgcggaatgttttaattcgttatgagctaccacaacggatgaatcctgagttaacacggcttgcatattttccttgagttcgatcaccttgttatctccggtgtacaaggttgctttgaaacttccagcctgaatttgagccgtgtgaacgggggcaagggtgatattttcgggatagaaccagtaagagccgatggcgaacaatagggctatcgtggcagctatgcctatctcccgataacgaatgattcgtgtatgacggtttcgggttacttgccattgtttccaactttcttcgatattggaatttaaacgattatattgttccagcttgttttctatgttttgtttggataaaacttcccgtacgattttctcgtcttcttcccggagcgagttttctgtattctcctcactcttgttctttcccgtgagatacagcccgattcgaagggcctgttttatcgtttcttcaatttgtctcttcatttttatctcctattttcatataagaaacacgctcgttaaggtttggatggagacaaaaagtgattttttttgaagaaaaatgatatgttattgaaaattaggaaagtaaaagtaataatatttttaagtattgtagtttttcccttagtactgcgtaaccttttgccttatggctcttcacggtagagacggcaattcccagctcttgagcgatttcttcgtttgatttttcctccagcgtgagcaataatactttttgctccatttccgtgaggtggctgatttcttgatgaatgacatggaatatttcttcttttacaaccgtttcgtgtatgaaactctcgctttctaggtattgaaggttctccgcgagatatttattttgtacttgttgatgacggattaggtttagacacgtgttacggattgatttgtagaaaaaagctctaatggctattaaattatcgaaatcgtttcgggtattccagtatttcagaaaaacatcatgtaccacgtccttacattcttcttcggaaggcaacaagttgtttgcgaaagaaacaaatagggcaaaatactcttcgtaaaagcttttgagtgttttctcttttccgttttttaattcttctactaggagctggtcatgttttttcatacacatacacgttatacatttacaaatataggatatttttgattggatcaacatattttaaaatgtatttttgtccttgatgaattatattgaatggaacatagatcccgtcgcgttttgggtaggaggaatccctgtcatgtattacagtttgctgttgattgcggggaccgtggcgtccgtgtcgatactgaaatgtgtttaccgggaaaacgggataccgtgggagcatctccagatactcgtgatgctgagtattgccggcttgtttctaggggcgcgtctggggcattgcctgatttacgagtacgcgtattattttgcgcatccattggaaattttgctcccgatacaggttaagtcggatggaagtgttattttttccggttatcaggggatgtccagtcatggagggcttgtcgggtggatgattgccatggtgatttattcccggattacaggtgagaacgtgttacggacacttgacacgattgctctcgttttacctttagcggcggggtgtattcgtttgggaaacttagcaaattccgagattatcggaatcgaaaccaacgtgccatgggcctttgttttcgaacagattgattcggtaccccgtcatccggctcaaatttatgaggccttggcctatttctttactttcgggataaatttgttgctttaccgacgaatcgggttgaagtgttataggggagtacttttagggaatacgcttgtctgggttttcgtggctcgttttttgattgaatttgtcaaggaaaggcaagtccctttcgaggatcaaatgactttggacgtgggacaggtgttgagtattccgtttatcttattgggtatattcctgttgatttgcgggtttaagtgtaaaaagaatacgacacggtgattcatgtaacgtgtgtaaatcgtgttttgttcctgtgaaagaaatgtttattgggagttgttattagatatggctattattatatgatcatgctgttattata

SEQ ID NO: 256 - DNA, 6379 bp, Butyricimonas faecihominis
atgtaagctatgtcattttttataattttgcggagattatcaccataaaaataaagaaatgaaaaaaatcttgtatgtattatgtctgcttacgactcttgtagcgtgtagcgatgacgatgacaaaattattaccgattatgacaaaccgtacacgaagttaccctcttccgaattaagaactttaatcgaagacaatatcagttcatgcgaagcgttggtcaaggagtttagtgagatggatgaaaataatgagatattcgatttaataaggtattatgatataaacttgagtttcaatatttccgattttataaactcccgaagttcagactcaagcaaagaaaacacatttaccggaatgaaattagtttggaacaaagacaaacaggacttcgacacgaccatcaatgcagccggattcatggaagttctcttcccctcttccaaaacagatcagtccaaaaatgatcttcgtttcattgcaacgattgattatagtaccggtgtctgccttaaaatggaagtttacaagggtgaagaaattctattacacaaagtacagcaatataacaaagaaacttccgaagccatacaaatagtaaaatgtcctccttacagccaaatggtcaagatggaaataaattacgatgatattgtctcccgatttatcatgagaagaatgcccaaagaggtcattgtacaaaaggacggaggagattattacagcctttcaatgaatatcgaaaatggcaacttagatttagtgacagatttcaataacatccggattcgctctacattcgaacaatataacagcatacaggcgttaattgaggaaatatattacacgaatgaaggacgttatgacgagttggttacagaacttttcagaaaaaatatgcgagagagtgttattgttttcacggataaagatgagaaaatcggagaatgggaattcgtggaactgaaacgaaatggagaaagccctttccctctttgtaaatgtattttccaagatggaacagaattatttttccatttgtatacatttatctagtatcctgtaaagatttctttccccggttttcaaaagagccggggaaatttctgtctaatgaatccctgtacgccccaatttctcgtttagtttacgacgaatgacattgatggcattcttgcgcttgaggagttccacgatttgcgaaggatctttactattctgtgattcaaggatgcgattatctatatcccgagagagcatctccactcttcgcattttgtagttatctagtattttaggtagaagttctccaagtttcatttgttccgtctcgacaaaactatccatcttgtaccaaatcttgcttaactcgtaaggttcgctcaggatattggcagccatggtactgacttttatatccgggtaagagataaaataacgggccgggataaacgacggcgactcgtactgacgctggtactcctgttgcatcgtgcggaacacagggttcaacaattccaaatcatcctcactaagctcccggatgatgaattccccgacgctcacacttcgcatatacccgttacgttcctcctcgtacaactcgctatccccgaataaaagcaggtaacgaatcagcacgctctcctcgatgtcacatggagtagcgcctcttaccggggttgtcacttgcaactccggtgtcgtgacaggagtcctagacggctgctcctcatttttcaaccggaccttggcaatttcggtatataaaacccgttcctcaacgtccagctggtgggcagtttcccgcacgtaaacggaacgcacgatgttatccggaatcttggcaatacttcgcacgatgtccgtgattaggcgagcccgttcaaccggatcatcccccgcggtacccagcaataatttagtcttgaaatttataaaatccgtctcgttattcgcgataaaatccgccaaatcttgcggcgtgtgactccgggcaaaagaatctgggtcctccccgtccggcagtaaaagcaccctcacgttcaatccctcttccagcacgagatcgattccccgcaaagaggccttgatcccggcagcatccccgtcataaataattgtcacgttcggggttagtcgacgaatcaaccggatctgttcgatcgtcaaagaggttcccgaggaagccaccacgttctcaattcctttcgcatgaaaagagatcacgtccgtatatccttccaccaagatacagcgatcttgttgcacgatagatttcttggcaaagaatatcccgtaaagggttttactcttgtgatatatctcagactccggggaattcaggtattttgaaatctttttatcggctgtcatcgttcgtcccccgaaagcaatcaccttacctgccaaatcaagcacgggaaacatcacccgggcgcggaatcggtcgaaaagtcctttctcgttctcgatggtcaatccggtcttcacgagaaactctttcttgtagcccttttcctgagctgttttcgtgaacgccccccaaccttccgggttatagcccaaaccgaatttgcgaatcatctcgtcactgatacctcgttgacgcaagtaacccaatcccacggaacgcccctcgtccgtgttccacagctgatactggaaatactcgttcgcataggaagagactatcaacatactctcccgctccgttttctcctttttctgttcctctgttaattccttttcctcaaccgggatatgatatttctcggccagatatttcaatgcctccacgtaagacatctgctcgtgttccatgataaaattcacggcatttcccccctttccgcaaccgaaacatttgtatatgccctttgccggggaaacggtgaacgaacctgtcttctcgttatgaaacggacataacccaagatagttcacacctcgcttttttaaactcacgaaatcggaaaccacctcgtatatatccgccgcatcaaaaattttctgtatggtagcctgatcaatcatgatacaaagataggataatggaattgaaaatggagaattgaaaattgaaaatgatgtaataagattaaaatcattgaaaagttgcgcccgacaagagttttaacaatactttaacacgcgtgtcgtattagtggaacaatatttgtatacttttgcacgtggaaacgttttaaacacgtttcgtttccaagtacaaacactaaaatgtcagctatggatgaaaatgtaaaacaaaaaagggagcttatagccgcaatttcggatcttttcctgagattcggattgagaagtacctccatggatgatatagcgaatcacttgaaaatttcaaagaaaacactctaccaacaattcgccaataaagacgacgtggtggagcaagtgatgttgtacaggagagatgaaaaaataaaaaacacggatgttaatcaactagccaagaaaaacccgatcgtggtcatgagcgaaattcgggatttcatggtgagtgatttgggtagccgcttacctgccaatcattttgatttaaggaaatatcacccggccgtgtacgaaagagtagccaagcaagaagaggagtcaacgaagaagtttctcgtggcattactggataacggtataaaacaagaactctttcggaaggatattgacaaagaattacaattgtacctgttaggcaaacaattgcacttcctgaaagatcctgaaatcaccagtaagcttgaatacccgatttcagtaattatttcaacgatctttatcaattttatttacgctatatccacagaaaaaggtctaaaagaatttgaacgcctaaggaacacggcaaaacgaccagaagacggatgattgattttttttggtacgagttttgtaacgagagaaaaaacacttgaaaaatttcccggaaaaaataaataattaaatctataatctatgaaacaaggaatgactcttttcctcctaatgtttttcgtgccatggatgctccacgcacaggaagcgccgcaaacgatatcgctgcaacaagcagtggagtttgccatcaagcacaataaggaactgcaatcttcgcagatgaatattgatttgtatcgccaaaaggtacgggaatccgtatcacaagggttaccacaagtcaatggtactgtaacttacagtaccaatttcggctacaagatggattttggcggtcaagcaataaaaatgaaagaccagtctaacctaacagtaggtttacaacaattattattcagcggccaatggattctagggatgcaaaccagtaaaatcgctgtacgcctgaccgagcaggaagttgaaaccacggaactggacatcattgagaatatctataattcatactacacggtactagtatccgaaagaatgctcgatatcctgcgtcagaacttggagaacatgaatgaaatttacaagcataccgataacatgtacaaggccggaacggttgaagtgacggacgtggatcaaatccgcattaacgtgggacaactgaaaaacagtttattgtccatggagagaacggttgccgtgaattacaatttactacgtcttcaactaggactggaggcaggtactccaatcaaactcacggatgcgttgaatgtattcttggaaaacgataaatccgcccgcttgtatgtcgagaaattcgacatcaataacaacttaagctatcagttgatcacgactcaaaccgagttgaataaaaagatgttaggattggagaaatggagttacgctcccacaatctccggtaattataacttcaactacaagattttgaaaccggcattggatatgagcccgaaacacacagccggcctcacaatgaatattccgatcttctccggtttgcaacgggattccaaggttaaacaagccaaaatcacgttggaacaatcttatatgcagaagagcttgttgcaagaccagttgaacgtacaagacgaacaattgaaattcaacttgaaaaacgccatggaaaattacagcctgcaaaaagaaaacatcgatgtagccacgcgggtgttaaaaagttaccaaaggaagtacgaactcggagccgtttccagtctggacttaacgcaagcaaacaacaactacctgcaagcagaaacaaattacacggaagcagttcttacattattacaagcacaagtaagcttggaaaaattgtataatcaacttcctcgataaaacaacttgaataataaaaacaaaaaagaaatacaatggtaaagaatctcattttatcgattatagcgatagctatccttgccggttgctcaggcaaaaaagataagacgacagacagtgatgtcgtggaagcaatccccgttaaagtacaaaagttagaaaaaacggatattgccagaaccttggattacgccgcaaatctggaagcagataaacaagttttttacgcccctgcagccaccggaaggattgaaaaaatatacgtggaagttggagatcaaatcaaaaaaggacaagtactcgttgaaatggacaagacccaactggtacaggctgaagttcaattaaaaaacttggaaacagaatataaccgtgccatccaattaaatgaaaccggaagtatctccaaacaagcttacgatgctgccgtaacacaatatgaagtggccaaagctaacgtggaattcttgaaggaaaacactcaaatgctcgctccttttgatggagtcgttaccggaaaatacttcgaggacaaagagctttacacgggagcttctttcggtggtgcaaccaaaccttctattatcgccattgaaaagattgatccggtaaaagcttacgtaagtttatcagaacaatattacttgaccgtgaaacccggaaccaaagttgaattaaaaaataatatttacccagaccaagtattcgaagggaaagtaagtatcgtttatccaagtatagatccggcatccagaactttcaccgttgaggtcaagatcccaaacaaaaatgaagctctgaggccgggaatgtatggcactatcaatttctttatcggtaacaccgagaccgtggttgccccggctatcgccgtgttaaaactacaaggttctaacgatcgttacgtgttcttgaacaaagacggtaaggcaaaacgcgttggggtgaaactcggcaaacgttttgatgacaaggttgaattaatcagtgatgaagttcacgaaggcgacgaactaattgttgtcggacaaggacgtttggttgatggctcaccactttcaattaccaaataaacacttattcacggattgatgcctgaaatctaaaattcaaaat

SEQ ID NO: 257 - DNA, 6365 bp, Butyricimonas faecihominis
ggtaaagcccaagagcgggggtttcaaataagtggtaaaatagatggaatattagaagggactctctttttaatgagtgatgaaaaaggtaaattagaagtattggatacaacttctattatgaatggtgcttttgtttttacgggaaaagtagagagaccattatctgcttatattatggttcctaatagtaaaaattatattccgttaattcttgagaatgtcaattttatgttgaatataggaaaaacaggtgtgttgataaaggggggagaacaacaggatattttgaatcaatttagtaaaataaatattgatttgttggaagggcagaatagaatacaagaggagtttaagcaggcccagcagaaaggtgataaaaaaaagatgcaaattttacagaaacaattagagaatgttttggagaatgctcttcagcaagaaaaaatgttattacagaaatattcaagttcttatgcagctgcttatgtgattttccatgaaatgaaacagttggaggagaaattcttgattgataaatatatgcttttgacgaaagcggcacaggagactgttcctgggcgcattattaaaacttatattgaggaatgggaatgtcttacagaagggaatgtcgctcctgattttacacttttttcatcaactggagattcactttctttgtatccattaaaaggtaaattgaaattaatacatttttggtcttgtgaagatattgcttgtagtcaagaaaatgtagaacttcttgacctttaccaaaggtatcatttgaaaggtttggaagtgattggtgtttttgtcggaaatgataaacaaaaatggatgaagacattgattgaagacggaatgatttggatacatggatttgatgaaaatcatcgggtggcagatctttatcatgtgaaaaaattaccgactataattttgttagatgcagaaaatcaaattatagcaaaaaatctattcggtaaagatttacagagaaaaataggtgaattcttgaagaaaagtaagtagaaagttgtccaataggtcttaggttcaagtttccgttcataaagatgaggatttcctgaataagtttttaggttagaaagggatatctattaaatagggatagttgcgaaatggctttatatattgcaatcaattgattaatagtgtgataatgtttttgtatcttagctaaaggaaataaaaattcctccaaacaccgtagaaaagtgaatttcggagtaagcactcgaagaactacagggtagtatccaaaattttgtgtaaatgataactcgggtatatcatattcgagttattatttacacaattttatggatggtgtcattaaatcaggtctcctgttatgtatgttttagaaattaaccccaaacccgatcgtgtacgggtggatttcgggggctttgttcttttccatcatgtttgtgatggtgtaacttccccataatgccagtttgtaatacccgacacgaaccacggcatccgcttttaccgggttcatgctataattaccggaatttttcatgcgacgggtatcaccgttttcattcttgtaaacgacttttgttttggtatgtaatcttaaaccgcccatcactccggctgccacgtaggcacgttggtatttcttggctgggaattgccattcgaagataagaggtacggtcaggtaaaggttcttgaaagaactctttttgacattttctacttccatcgggtagatttgcccgccgtcaccacgtttaatactatttttgttagcaaagcggaaacgttgatactctaatcccaaaccggtaactaaaccgatgttgtttagcttgttgaggcgcatgctatactggaacatgttaaattgcatgacgagcgaatttttacgttccaaatctaaatagtctccggctccatccagttgttcgttactgacagagaaatcggcaaagcctaggttgaaaccgctccagtgtccccggaaacgcggattttggctgcgttgatataccctactatggagagggttacttaacacttgcgttttccaaacttctcctttttctcgtttttcctgaagatgtacgttctttatggtatcggcttgattcgttttttctgcctgagaaaaaaaggaaaagctgcataataaggtcaaggtgataataatacttttcatgatattatattgtaagctgtttatttacgcgtgttttgatcaaatttgaccgagttgaaaaacttgtctctctggctttcgagttcttccaagtcttcagttttcccgcctatcgtgagttggtacatgcaattgtcccggaagataaatcgtttgaaatacgtcatttcttcctcgtctttcatgatggtgtatgatatttcccggatgtccatgtccacgtcgggaatccttttctccccggtgagttttgccgtgggcatggagacagattcttttttcatggatatgtatagctggttgatcgtgtactcgtccagcacgcctttctctttggtgagctgggtacaaacggctccgaacacgcaggtaatatttttggtctggaatatccatgaccgcatgttatttacctctttcttaaagcgttctccgcgactggggaacgagaacgagatgtagttatccccgtttattctcacccaaccgtctttttccggagccagacagaggatcccgataagtataattttaagtatcgacatatccattctctttatttcgtgagttaaagatagaaattattatttttgtggcaaaacttatttaattgaagatgattgtcggaggaaaagatgtaggagatcggccgttgattctggccccgatggaagaggttaccaatccccctttccggaaattctgtaaacgctacggggccgactggctctattcggagtttgtgtcggcggatgcgttggtgcgttctattaacaagacggttaagaagttgacgatagaagagaatgaacgtccggtgacgatacaaatttacgggcggtttattgattccatggtcgaggcggcaaaaatagttgaagaggttcagcccgattttatagatataaattttggttgtccggtgaaacgggtggccgcgaaaggggcaggggcaggaatgctccgggatgttcctttaatggtggagatggctaaacagatcgtgcaggcggtgaagattccggtgacggcaaagacccgtttgggatgggattgcgagaatattatcattgatgacgtggcggaacgcttgcaggatgtcgggatcagtgcgttggctattcacgggcggacccgttcgcaaatgtataaaggagaagcggattgggaaccgattgcccgggtaaaacaaaatcctcgtattaaaatcccgattatcgggaacggggatatagattcaccacagaaggtgaaagaggcttttgaacgttatggtgttgacggggtgatgatcgggcgtgccacgatcgggaaaccttggattttcgagcaaatcaagcattatttggccacgggagagatattaccggaattgtcggttccggcccagatagagatcatcaaggaacagattctgttgtccatggaatggttggatgaggtgagaggtttgtttcacatgcggcgacacatggcctgtatgtttaaaggcttgcctcatttccgggacttgcggattcaaatgttacaagctcctactattgaagagttgtggggggtgtttgatcagattgcagaacgctatggttcgatggatcccgaagatctagtggaggaggatctgaatagttagagggggtagttgtttcaaatagacttgtcagacagtcccccaatagaataaggtccataaagttttagtattttgtacgttataaactttatgaaccttgtaactttataaactgatatacagaagtgctgcaacaagcgatcccgctaatggtccgacgatgggaatccacgcgtaatcccagccactattgcctttgcccggaatgggtaggatggcatgcatgattctcggtccgaggtcccgggcgggattgatggcgtagccggtgactccccctagggaaagaccgatgacccaaacaatgaacgatacgggaatggccccgatagaaccgagcccgatcggggtggttgagtccacgtctgacatgagttcagccccggtaatgtagaagactgagaacataagcacgaaggtggcaatcagctcgcatccgaaattcacgatattatggcgaatttcaggagcggtgcagaatactcccagtttggctccggtatcttccgtggctttaaaatgatcgtaatagatgatccataccagaaaagcccccagtgcagcacctagcatttgggcgatgatgtaaggccccacgctggcccacgggaatttctcggcgatggcaaaacctatcgtgatggcaggattcagatgtgcgccgctgtaagggccggcgatcacaactcctgtaaatacggcgagcgcccaagccgtggtgatggtgatccatccggcttggaatcctttggttttcttaagcacgacgttggctactacgccatctcccaaaaggatcatgaccattgttccaagtagctctgcgataaaaggtgacatgatgagctaaaagtttaaagttaaaaactaaaagtattattcttcacccagttcttcccatgctcttgcacgttcgacggccttatgccacttgtggagcatggcgttcacgtgttcctctgtatcaataggggtaaattcccgatcgatactccattgttggcgtaattcgtccgtgtcccgccagtagccggtggccagtccggccagatatgcggctcccagagctgttgtttcaagaatcttcggacggatcacggtttctcggcaaatgtcactttggaattgcattaggaagttattggccactgctccaccatctactcgcatctccggagaggttcgtttcgtgtcatgttccatagctttcagaatgtcgtagacttggaaagcaatgccttcaagggtggcccgggtaatgtgcgcgggagttgttcctctcgtgaggcccagcatggctccacgggcgtattggtcccagtaaggggctcccatacccgtgagggcagggacgaagtagactccgccgttatccggtacagacgtcgccagcgtttcactttggcttgcactttggatcaaattgattccatcacgtagccattgtatggcggcacctcccacgaaaacgcttccttcgagggcataagtaacggagttcccgatcttccaagcaatcgtactcagcaagttgttctcggaagtgaccacctcgtttccggtgttcatcaccatgaaacatcctgtcccataggtagtttttgtcatatccggttcaatacagagttgaccgaatagagccgcttgttggtctcccgcgattcctgaaattggaatcttcgttgagaataaggttgttgcggtttctgagtaaatttcactactactctttacttccggtaacatggattccgggatgttgaacagatcaagaagttctttatcccatttctgggtatgtatgttgaaaagcatggtacgcgatgcgttgctgacatcggtaacgtgtactcgtccgtgagtgaatttccagactagccagctatcaacggttccgaaacatagttttcctttttcggctctttcccgtactccttcgatattgtcgagaatccatttgattttggtggcggagaaataggcgtcaatgatcaaacccgttttctcccggatcatatcggtatatccgttttcttgtaattcccggcaaatatcggctgtacgtcggtcttgccacacgatggcacgataaacgggaagggacgtctcccgatcccacacgatggtggtttcacgttgattcgtgatcccgatacaagcaatgtcaagtcctgtaaggtttgctttggcaacagcctcagccgcaacggatgattgcgagtaccagatctcattcggatcatgttccacccaagcgggatgaggataatgttgttcgatcggtttttgagccatggcaataatattgccatcatgattgaatagcacggcccgggaagaggttgttccttggtctagtgcgagtacatatttttctgctttcatttgatagttattatagtgtataacttgtgttcgtttatattgtcacgcgtcaaatggtttgtttctagccctctcttcactctttttgtcaacaaaaagttagccaaaataattcattcaaaccttaatccagtatacggt

SEQ ID NO: 258 - DNA, 6361 bp, Butyricimonas faecihominis
gttattaactttgtgaaaattcatttacatctactaaatatttactattccatttctattttaattggacaggaataggggaggaataggagcggaatgggagcggctcacaccatgataactatattataacgatataatacaaattttgttaattattgtaagaggaacaagcgttaaaatttttctgaatccgaacttaaatcagaagatttttcctatgatatgttcttcctgtcgaattcaacagatatacattgattctcgacaaggtttcaaacgaaaacagatgatcattttcagataataatcgtgaataccgtctctttaccttctatggatgaagcttttagattaccgccgtgcatgcgcatgatctggcgggagacacttagcccgatacccgaaccctcttctttggtggtaaagaaggggacgaatatctcgttcatgatttcgggaggaataccgggaccgttgtcccgtacccggatcaatacctttcccgtcggtccatgttcggccgagagggtgatgtgggcatcttctctaccccgcaaagcgtaaaacgcatttttcatcaagttcaaaaggacttgtcccatgaggttcggatcggcaaaaaccttcaggtcttccggctcaatgcaaatgtcgatcgtgacttccgggaaattcggttccgtgctgctcaggatcaccgcccgctggataaattcgttcaaattgatcaattcccgttcaggccgagggatacgggtaaacttacgataggattccacgaaagagatcaaccctttgcccgtttcactaatcaccttcaacccgttttccgtattacgtttcaagtcgtcgggagtgatttctgggtcagagtgcatggaaagtaacgtgtcgctcaaagaggttaccggagcgatagagttcatgatctcgtgtgataacacccggatcagacgtacccaagaatcaatttctttctcgtcgagttcgttctcgatgtcattcataactaacagggtgatgggtttgtctcttaacaggatgcgagaggcactgaccaataattgcacggaaccccgttcgtttgtgaaagtcacccgccgactctctccgggacggattcccgtcaccagcaattttaaggccggggacactcgttccaactggttgacgtgtgtaaatatctccaagcctagcaattttaaggcgacttgattattctgcgtcacgaatccccgttcatccaatgccacgataccggaactcacgctgtttatgatcaactcgtaaaattgctcccgttgctgtatctccaagcgggtgttctgcaaaatatccttgatccggttcagtaccccgttcaggaaacgctcggaatggctaccgccgtgttccgggaaatgaatggaataatcatcgttctccaaggcttgaaagaagtaagccagtttccggttcacggagcggatattccacacgatacgaaagcaacaccccacggcgagtattgacgtggcaatccccggaatatactcatcttccgacaaaaaataacaggtcgccacgaccaaaacgatcagaagtaacaaatacgccaatacccgcgaggtgatgtttcttaccatatcttattcttacagattgaattttttcatcttgttatacagggtttgccgggtgattcccagccgggacgcgacagccgacaaattgccctcgtgccggaccaaagccttgcggatcatctcccgttccatatcttcaagggtttccaagggagctatctcgcccggctcgcttttgaacaggaaatcttcgggggtgagtacctgccgatcgcacatgatcacggctttttccacggtgtgctgtaattcccgcacgtttcccggccatgaatatcctaacagccgttgccgggtctcactggaaaaggacaaatcgggtttccggtatttcctgccgtagtcccgtaaaaaggcctctgccagtaacagaatatcattccctctttcccgtaacggggggacttccacgtggatcgtgttgatgcgataaagtaaatcttcccggaaagtaccttctttgaccatccggggtaaatcgctattcgtggcacagatcagacggatgttgacgtcaaccggtttattcgatcccacgcggatcaccttccgactttgcagggttgccagtaacttggattgcagggcgtatgacaagttcccgatttcatccagaaataacgtacccttgtttgccgcctcgaatttcccgacacggtcttcccgcgcatctgtgaaagcccctttcacgtgaccgaacaactcactttcgaaaagggtttccgtgattgctcccatatccaccgaaatcatcacctcccctttccgccccgacaaggcgtgaatttcccttgccacgatctcttttcccgtgccgttttccccggtaatcagcacgttcgcatcggtgaccgccactttttcaatcaattgacgtacccggcacatggcatccgactctccccacacgacggttcgttccggggaaagctgccctttcaacacttcttcttttgctttcagttgtttcacctcgcgtcgggattcatgcagacgatacgccgccaacagggttgccacgagcttggcattatcccacggcttgacaacaaagtctgtcgctccttccttcacggctcgcaccgccagatcaatgtccgcataagccgtgaataggaccacgggaatttccgcggcataccccttgattctcgacaaccagtaaagtccctcgttcccggtattgattcccgccgagaaattcatatctaacaataccacatctacccgaccggattcgagggttgcctcgatctggttcggagttctgatcgtgatcacttcacgaaacactcctgccaacagcatctccaaagcgttcagcacggccttgttatcgtccacgaccaatatggttccctgtttcgccatatatcttgtttttctactccaacattttttctaaaatacgctccacttcttcaggtgacggaccgatggctaaaattttgccgtcccggtccaccaaaaaagttccccctccggaattaccgacacaatatttaaaccaaatgttcccggcatcgttgagttccacgaggttcaaccacgggtagccatcttgaagggccgcagctttcgccgtctgcaccgtcttttctcgggcaaccccgacgatcgtgaaacctttggatttgtatttttcatacacgggaatcatgcttttcgccgaccgtcggcacgggccgcaccaagaggcccacaggtctatcaaagccacctttccttttatctgctcggataacgtcacgggattcccctcgaagtccggggcggtgaagtcgatgtaatgtccacccacttctatctgttttaatgactggagcatggtagcgattaactccgtgtatgaatgtttgggaaacatgggtttatagatggtataatacatattttccagacgcggcaagtctttaaaagacaggacttcaagttcttcggggaaactgtgcaaccgataagtcatcagattcctcaaatcatccattaacagaaaataagttgtcagtgacggatgctctccgatatagtcctctttccatttttgttcctttttactcaactctctctttttctcatttaacgccatcatttgaggggtgtacattttgccatccttttctaattgcagaaaagcggcatacaggctatcatgtttctgcctgtttttgaaattttcggacattaattcactcaatttctgcgcctcaggagtgaaactaagattctgattatgcaacgaatcgaatgcgctatacaacgctttgaaattgaatttatcttctttcaatcgttgataactcctatactgctcattgacttctcctccatgaatttccgaatccgtataggcatcttccggctgaatcgtgatctcgacttcccccggttcaataaaaaaacttaccggacgataagaagattttgccagttcgtcggtaaacacgagccagtacattttgctctctcctaattggcacacgtattcgaacttcccgtttcgaacaggtataatggcgtatggttcctgaatccgatcatcatcctcgtatcccatcagcaccaaccgatagctcgacgggtgtcccagcaccttccctcggatcaggcaatcgctctccttttccagcttttgcggtttctcatccaacacgattcccccaatccgccagtccgtttcgtggtttccttccacgtaatccacctttttctctccggcatccacgggttcgaaatagagctgaaaagtcatctgtccggactccggtaaaaatacctgttcattcagctcgattccctcagcttttaagagcttgtactctttaccactttcccctcttaataccgtacgtcccacaacccgaaaccactcgttagggaaatacttcacttgtcccgtgataactgttgcctcatcggtcagctccatttttataatatcaaacatatacgtgttggtggtctcgtaccacgggacttcaatcactcgttgtccccatcccaacgatgtccagagacacaagcacaatccgaagagcaagcttttacctttcataagttgttattttttggtttttaattcttcccgtctcgtccaaaattttccggttgacaatcgttctattttaaatcagaggatttcccggttttccagctcggtcacgatttgcccgtcaaagagatgaaccacccggtgggcatacgaagcatcatgctgggagtgggtcaccatgacaatagtggttccctcttggttcagctcggtcaatagattcatgacttctgccccgtttttagaatcgaggtttccggtcggctcgtcagcaaggatcagcttgggccctgccacgacggcacgggcaatggcaacccgctgttgttgtcccccggaaagttgctgcgggaagtgcttaacccggtgactaatgttcatccggtcgagaatcgacgtgaccagttcttttttctccgacgcctttttcttcaggtagatcaagggtaattccacgttctcatagacattcaactcgtcaatcaggttaaaactctggaacacgaaaccgatgttccccttgcgaacctgcgtccgctgtttctcttttaaatgcccgacttcctgtccgttgaaataataattcccggatgtcgggttatccaacaaaccgatgatgtttaataaggttgacttaccacaaccggaaggtcccataatggccacaaattctccctgtttcacgtgaagggacacatcgttcaacgctgttgtttcgacctcttcggtgcgaaatactttacttaaatgctcaattcttatcatgattcaatctatttacgagtaaaacttcacgttgaacgtaccattatcatgccaaaaggtattttgcactaattatcaacacattaccaaaatatactttataccacgtgtcaaataattagacaatcgtgtcttattttttgacatcccattcttccctattttcctctataccgctggaaacaaacactttccgactttggcacgacattcgttcctctggatgcaagataaaacaaaaaatgatgatattaaagcaatattccattctattgagcattttaacatccggcttgtttgtcaacggacaaaaccgggaatggagccttcaggagtgtattgattacggcgtggagaaaagtctttccatgcaacaacgggagctacaaaataaaaacgataaactggacgtgcgggatgccacgctctcgctcctgccctccgttaacgggatttctcccggcgtcagttacagtttcggtcgggggattgacccggaaaccaacacgtacacgaatacccgctatatgtcggtcgggggattcggcgtgggcagtagcctgaccgtgtttgccgggttcagtaatatcaatcgcctgcgagctgccaagttaagccgcctgatgggatgggaagaaaccgagaaccaagccaaccagatcgccatacaggtgatgaacgctttcttcacgttattgtatgcagaggaagaggttcggatcacgcaggaacaggtggaaaactcccggttgcgtctcaaaaagatcgaacgggaatacgagttagggaaaaagccgaaaagcgatcttttcgagatgcaggcgcaacaagcctccgtggagttccggctgatcacggcacaaaataattgtctcaacgcacaggctaatcttaaatatattatgaattataacgc

SEQ ID NO: 259 - DNA, 6285 bp, Butyricimonas faecihominis
attctcttttatttttaatgtgcttgtatgtgggtatattaaatgcacaacttgtcaatcaggatgatcaaacggctaagaaacagtcggatttggattggtataactgttcttttgataaggatggagtatatggggcagaagtgaataaagcttatgagtttttgaaaggtaaaaaagtaaagaaaaggccggtagtcgctttaatcggaacaggattggatgtggaacacgaagatttgaaacaagcgatttggtttaacaagaaagagaaggcgaacgggaaagatgatgataaaaacgggttggtggacgacattaatggttggaactttttaggaggtaaggacgggcaagtgatggaaaaattgatgcaggaaggggatcgtgaattcttacgtttgaaagaaaaatatggtgattatcttcaaggtagagagggtgagtattttaaaattatagatggaaaaagaacaaaagttgctcctcctgaaaatttagcggaatatacttattttatgagccacgtggttccggaatcggaaattggtagatattacttggggtcgcaagccgcctatacttatcaggaatatggtcagatatttaaagaggaactggagaaaaaatacccgggaaaagagcttacggcaacggaatttgcaacttgttatgatcctaaagctccagctgatcctttgcgtgatcgggcttttaccatgattgccatgggctttaatatttacaaaactcctagtttggatttcgtgtataagaattttgttaataaaatagtggcggaatcccaaaaggattacgaaagaacactaaaaggatatgggagtgatggacgtgctgatattgtcggggatgattatatggatataaatgataacaaatatggaaataatgtcctgttgacatctgaagccggaatgggtaccatgcaagccggggtgatcggtggtaaaagagataatgatttaggagggaatggaattatggatcaggcggaaatcatgtgtttacgagtgagtgcttcccgcggggagccttatatgaaggatatggcattggccattcgttatgctgttgatcataaggcggatgtaattgtgttgcctcagcaaaatacgttatatcctgaaggacaaggacaatgggtggccgaggcgttgcgttatgccgaaagtaaaggtgtattggtaattgttccggtttgggaattatcacgagacttgtcaaaacaaacttttttcccgaatcgctggatggatggagagaaagaattgactaatttaatggttgtggcttcatcggataaaaatggaaatccttctttgaattcaaattacggggcaaaagagttggatttgttcgctccgggtatggacatctattcttcatatatgggagatacttatcaaacaggaagtggtgcggggttatcgtcggctacggttgccggagttgcagctttagttaaagcttattacccgaacttgactggttcccaaatacgtaatatcttattgaaaacagtaacctctcgcaagggcgtagaagtggagaaagggattattgtgaataataaacagacacaagatctattcctttttgaagatctgtgtttatccgggggaattttaaatgcttatcaagctatcatggcggcagataagttaacgaaataattttgatggaggaatcaagatgaaacagagaatattgatttcattgttattgtgtgtgctggcaatccccgggattgcccagccacgtaaaactgtgttaccttaccgtttggtggggggaaagatgatcgtggagatgatcatgaacggaactccccgttcgtttatttttgacacgggcgggcagactgcgttgtctggggagatttgtgaggagttgggattgccattaacagattctttggtggtgacggatgtgaatagtaaaaaacttgcctatcctcgtgtagaaattgaaagtttgcttttcccggataaaatgtatcatttcatgcatgttccggccattaaattaccaactccttctccgtttgcttgttttcaaacggacgggttgatcggtagcgatatactgaaaggaatgatcgtggagcttgatggtaaagcgaagacgatcaccatttcgaatggagaacaggctccgacgatctctttaagaaaaatgcttggttttgtgaaaaaggggatgccggtggttgctttgcaagccggaagaggaaatagtatcaactgtttgtttgatacgggatttcccggtttcttctctttaaaaagtacggattttgagactttgaaatctgtaggcgcttttacggtattggccgaaggattcgggggggcgtcaatcggggttgccggggagtcatctgcggcttctttttaccgggtacaattcccggaactttctataggcggtactcgttttttgaatgtaagttcggagacagccacgccaccgttgacgttgttgggagtgaaattattggattatggtaaagtgacattggattatgcccgttctcgtttctacttcgaggcttacaaggcggagaatgatttgaagagcaagcactataacgtggccttacgtgtgaaagatggagtcttggtggttgcaaccgtgtgggatgccatgaaaggagaagtagaagttggggataaggtgactaaaatcgatggtcagccggttagtacgtatgatttttgcgagagtatcattaatggaatcccggaattgaaggcgaagaaaaaggttaaattgactgttcagaccaaaaatggcgagaagactatcgtgtacgaaaagaagtaatttatggtaaagttaaaaatattattcgtgtgcgtgatgatgatgtcattattcgtgcggggagttgctcaacaggcggtttctcgacgaatatgtgacacgattcattatgagtttatccacgataaaattattattcctgttacggtaaatggcgtgacggtgaagtatatcgtggatacgggaggaacgaccgggacgatacgggaagcggccgttgaaatgaaagctgttgcggcaggaggggaccttggcgtgagtgacatgaacggtaatcgtgtttcttatcaggaagctattttgtccaatgtacagctgagtccgaattataaattagctgaaataaaaagtctgatatttcctcagaatggcttttttaaagaattgggagtagttgggttattaggtagtgatgctttcgggcaggcagtacttacttttgatgcctgtgagcaaattatgattataaattacccttatcgtccttcaggtttgaaaattacggagggcgtgcctatggttggcggtgtccctcaaccgtttgtggacgttgattttggaggagtaaaaaagcctgtaatgtttgacacgggggcagacggtttattgcatttgttttacaatgattacgaggcattgaaagaaatgaagagtactcattcattggagaaggcatttgggataaatgcactgggtatcggagggctgaatatggacaatgcgaaggagatcgtcaaggtacgttttgacgaggttaatttcttgggaaaaaagttcacgaattttgaaagtgttactactcggagcggaagttctattatgggggtagatatgctgaaatacggtaaggtggtgattgattacattcgcgggcgtttttattttttcccttacgaggatcgtgttgaagatggacagggaaagcaagaattgtggaatgtgggtattttgcccgtgaaaggacattttgaggttacgttagtgtgggatagtttgaaagatgaggtcgcgttgggtgatcaagtgattcggattaatggtaaagatttatctgaattgggacaaagtcaattagaggtggatgcgttgttgaatgctgtagagggaaattcgacggagatcgttgttttgaaagacgggaaagagaaaaaggtgaaaattactaaattttagaagatatgaatcataaattaattatattcttggggttgatgttcatttcgatgattacgtttgctcaaacaaagaactcggctacagaggtaaaagattaccgggaggtagatgggaaaatcattctggatgtgatcgtgaacggggaagttgctccgtttgtgttggatttggctggacatacggcaatattaccggaatacgtggaaaaattccatattgacacgaatgtggcaggtcgtttaccctataccaattttttgtacaaacaggtggcgacaactggcatcgtgtccattaattcgatcgcttttggaaacaacgtgttcggtaatggtatttcagctttcgttctagaagacgaaccttatttacggaaattgggggtggcaggaattataggaagtacgttgttccagaacgtggtcttgacgattgatgcacaacgtaagaaaataacaacttctaaaccttatcggccctcgtatatgaaactggaccatcgtgcagatttggcgaatcccctaccgggattaccggtagtttgccaagtgatacttgatggagttgcttatccggtattgtttgatacttggtatgacgggatgattgccatgaaagcggatgattatgccaaactttctgggaataggggtggagaggctttcatcacgaatggatataaggaaacggaaaaaacttctgaaactaaaattgttggtacttgtgattttgtgaaggagcatttaactgatgttgtggtgacggagaataagaatttggcacgttctgtgttaggaactgaaattttaaagagaggaattatctctatcgattaccagaaacagaagatttatttccagtcttttgatttggcggaagtgaaggatgacgtgattgaagatattgcaacgcaaattgtccccggaaaattaaacccgattacccgtgaatattttctggagcatatttacgattatcgtaaagataaagagttcgtgttcaagggagataaacccgtggtcattgatttttgggcgacatggtgtgggccttgtatgcgtctgatcccggaattggaaaagatggcagaaaagtacaaggatcaggttttgttcttgaaagtgaatgcagacaaggaaaaagaactttgcacgatgtttaacgtggtcgctttgcctaccttattttttattcctgttggtggaaagcctattattgatgtgggtgcgcaaccagaaaaacacgagcaaatcatcaaggaacagttactgaaaaagtaatgatttgaaatcgttaataaaggcaatcttccatgtgagggttgcctttttggattaatgagaccggatggaaatatgatttagctctgtttttcaggaaaagtgatcggccttttggaaaatgaagaaatcttgtctatttttgagtttagataaaaaagcaataatactcaatacgtgcgagggaaacagggacatacgattcatttttctggagggaaggttttctctgtggatgagttgtacgatcgtttttacgatgaattggttttgtgggctgatacgatattgaatgatatgggggaggcggaagatttagtgcaggactttttcgtgcggttgtgggagaagaagttgaatgagaatctggagggggaacgggttcggtcgtatttgtatgtttccgtgcggaatatggctatccgaaaggtgaaggatcagagtcggatgcggcggattccggatatatcggttgtggaaagggtgtgggaggatgaggaggtgacgcacgaagacatgatagatcaggtgctgaaagcgcttgacgtgttaccgcctagaagccgggaggtgttggaatgcgtgcatttgaaaaatatgaaatatgccgaggtggcggaattactgggaatttcggtggccacggtaaaaacgttattggtgcgtagtctgaagacgttgagggggattgtttctgatacggcttttttgttgtacgtgcttgtttacggggaagatcatagaaggtctcgattgtttggaaaatcttgtcataaatccccgaaactttaggttccgagaagatggtggtaagcgttctgatctaggaatgtttgacaaaaggtttgtttgaataaatgtaaaatagtgttactaaaatgctatgatgttgttatcatattgtgagccgctcccattccgctcccattccggccctattcctgtcctattgaaatgataaaatattaggttataatagtaa

SEQ ID NO: 260 - DNA, 6278 bp, Butyricimonas faecihominis
aaatagtaattatagagtacggggcgggaaatttgttttcggtgagggttgcgatagagaggttggggtatgaggtggtttgtagtgctgatccacgggtggtacgggaggctgataaggtgatttttccgggtgtggggcaagctgccgcggcaatgagacaattgaaggaaagcgggatggatcgggtgattccggaattgaaggttcccgtgttggggatatgtttggggatgcagttgatgtgtgcctattcggaagagggagagacggagggtttgggaatattcccgatgcgggtggaagaattcgggagatgtggtaaggttcctcatatgggatggaatgagattcgggggctgaaatccgggttgtttgacggggttgtcgagggggagatggtgtatttcgtacattcgtattgcgtgcctgttggagagtattccattgccacgtgtgattatcagatagctttttccgcggcgattcggaaagggaatttctggggatgtcagttccacccggagaaatcggccggggttggggaaaagataattgaaaactttttaaaaatgtaagagaaatgaagataacggttattccggcaatagatgttataggaggaaaatgcgtgagacttacccggggcaattacgatgagtgtaagacgtattataatgatccggtggaggctgcccgatatttcgaggatatgggaatgaggcgtttgcaccttgtcgatttggatggggctagggagtcccgggtaattaattggcgggttctggaacgaatttgtgaggcgactcgtttggaggttgattttagtgggggtgtcaagagtgacgaggatatttgtcgggtgtttgatgtgggggcctcgtttgtctgtatcgggagtatggcccagcaaaatagagaaaagacacgggagtggttggaaagatacgggactgaacgggttattgtcggggcagatgtaagagacgggtatgtgtgtattcaggggtggaaggtggagacgaagacgacgatacacgagttaatagaaacttatttacccgggttaaagaatgtgatgtgtacggatattgcccgggatgggatgttgggaggagtttctttggagctgtatcgggagctggtggctcgttatccggatattacgcttatcgcatccgggggagtaggttcgttagtggatattcaggcgctggaggaggtgggtgtttctgccgtgatcgtggggaaggctttttatgaaaagtttaaaatgtagagtttagaatgcaaaagattccgtgattgccgattcgatgattggatgattaaaatcacttaatcgaaaatcattaaaatcacttaatcgataggatctaaaattaataagtatgtttttagcaaaaagaattattccatgtttggatgtaaaggcggggaggacggtgaagggggtgaattttgagaatttgagggatgcaggggatattgtggagttggccggtcgatattcagatgagggggcggatgagttggtgtttttggacatcacggcaagctccgatcaccggggtacacggttggagtgggtggaacgggtggcccgacaagtgcgaataccttttaccgtgggtgggggaatttcatcggagcgggatgttgaggctcttttgaagaagggggcagataaggtgtctgtaaattccagtgttttgaaagacccgggtttgatagatcggttggcggcggcatttggaaaacagtgtattgttgtggcggtggatgcttgtcgggatggtgagaagtggagagtatacagtcatgggggacgggtggctaccgatcgggagcttttttcgtgggtaaaggaggcggaaggacggggagccggggagattttgtttacctcgatggatcatgacgggacacatcaaggatttgcctgcgaggcaacgggacaagtggcggatttggttaatatcccggttattgcatccgggggggcgggctgtccggaagatttctatgaggctttgactcggggaaaagcggatgccgtactggcggccggagtttttcatttcgggcagatccggattccggagttgaaatgttttttgaaagaaaaaggtattgttgttcgataaaatatttaatgaaatggtaaatattgcagaattaaaatttgatgcggccgggttaattccggcaatcgtgcaggatgcagatacacgggtggtgttgatgcaagggtatatgaaccgggagtctcttgccgagacggagcgttccggtaaggtgtgtttttttagtcgctcccggcagcgtttgtggacaaaaggagaggaaagcggacactttttactggtgaaggagattttggctgattgtgatcgggattcattattggtgaaggtgaaccccgtgggaccgacttgccacacgggacaagatacgtgttggggagaagagaacgtggatcaggattttttgttttacttgcaacggtatttggaaaaacgaaaagatgaatctccggaaatatcctatacggctcgcctgatcgggaagggaattaacaaggttgcccagaaggtgggagaagaggccgtggagttggttatcgaggcgaaggatgataacgagggtttatttctgaacgaggctgccgatctgatgtatcactatatcgtattgttgatagcgaaggggtacgggttggaggatgtggtgagggttttgaagggaagacatgggaaagataaaaactaaaagataaaagttaaaagataaaaggaggctgtgattgctgatttaatgattaagtgattaatgaagagagtgtggttgtgggggaggaatcacttaatcggcaatcgtaaatcacaaaattaattaggtcctgttagagttttatacgaatttggaaggagaggtcgaatagtttgttgtcgttgacttgggttagggaggagctgatggttgatttgtcgggatagtaggtgaggccggcttttaggtagagggtgatgagggtgaagggtttccagttaagattaaggtaggaacgaaaaccccggtcgtacagggcgggaaaggagtaaccgtagagaacgttgttttcgtaggcgtatattctggtgttgtagctgtccgtgtcaaagtaagcgaaacggaattgggcttttaggttggtttggagggaggaatacataaggtcttgatagagtaggtaaccaccttcgtgtttttcttttttcatgtaacgtgtataactggttcgggttcgggattttaattgttcgcagatggagtaggtaaattggagcctgtattcttgttttatgcgggagacggattggaggttttctccggttttatcgtcttccggtttctcctcgtgtttgaaacgaaatgaacaatcccagcgagagcggttgaacgtgacatctcccacgatttcttggccattaccggggatggttgcctgataacggggagagaaaaagcggaacctatcataataggcattgattttcagactgcgaaaaggggtgctttcgagacctaggtatagtccttcctcgtttgttgtgttggagtattctgcaaaaccgctgttgtagtgagagtgatagcctttgtcatagtggcggtaaagggcgcataaggcgaagcggggaatcccactgtaacgtagcccgttgacggttgcccatgttccgttgtcactacgtgctgtttccccgaataggtagaaatggtaacctccggttttgtagtccacgcttacgagtgtacgttggtggcccgtttcgttgtattgctggtaagcggctttgccgatggttagggcgggtgaaaagttgtagtgtaataattggacgccgatgcggaaataccgatgattgaggtgggtggacaggccggttgtgaattcttttaggttgtgtttcttctcacattctgaaaggtttcggtgataacctgtttcgtaaagggtggccgtttgtacagtttttggggagagggtgtcgaggtcagcgagattaccgtctgtttttttgtaagatacgaagatttcggtggtaatcgtgcgtgtcgggtgcaggctgacagccatgcctcgcaagtatcggttttcatcggtagaagtgtagggagcaataccatttccggatttctcgttactaagggtagatgtcgatttcccggaagagtaaccgctccatgccagtagtccctgtccccattgtaatttatagtccccgacaatgattcggtggatgatttttcccggggtgtagcacgcgtgggcagaaagaaagtcaaatcctgttttttggcttttcgagaaataattttctcccgggtcgttttctaacgtgagtcccccttgccagtgttgctggtttgatattttgtattttagtaatgtacctacgggtggtccttgaaagcggctttgctttttggcgagatagtccttttcatacaaaaaggctttccggctgtactttttgtaaccggcttgttttgggcgggtcatttttaagcgggcgagaatttcttgcgataggtgataacgggattgcttttcgggggtgtatgttccgatgcgtataaatggtttgatgttggataaatcctgttgactgattccggtgacgagtagaagttcgttcgggtgagtaaacggcccgtgttttttacgaaagtccagtaaattgtctatctgcgcatcggaaaggaaaaataacattttcaagctatcgaatccggctgaattgaggtttatcggttgtgcggagaggcggattagggagttgatcatgtcctcgtaataatcttccgatgactcgatgtcgtttgtttccaagagtttctcgatatccggaatgctctgtgagtacacggagtaggggataatgaaaagtaagataacgacatatgtaatttgtcgcatggtataaatattcagattaaaattcgtgttgacgggaatttaatcatatgagtgaacacacctaaatagccgatgtttcaaaggtataaaatgttttggataatctttctaaaaatcttgtttttttagaaagtctgccaagtgtagatgttgaatgccttcaatgttacttcctgtgtttaagggattaaggctgaccacgtatttgggataattatcggggattgctaatagattgccaaattcccgttcttttgttttctcgtcaacaatgagataagtcgcttgtacgtagattttcttaccttgttttaaagctacgaaatcaatttcaagaccatcctgttgacccacgtagatttcatattgtaggattgagagatgtaaatatatggtattttcgataagtttatgaatatcacgttgtaggtcaaagcctatttgactgttacgtaacccgatgtcttcgaaaaaatacttttctccaatttcaaactttttcaagccattaatctctattcgtcccactttatgaattaagaaggcgttacttaaagccttcaggtaattgataacttgaagtgttgaaatatctacccgttgcgatttcaagtatttactaatattgttcgcggaaaagagatttccgatattgtcggccgtgtatatggctagtgtttcaagaaaatcaatattacgaataccttctcgcttaacaacgtcttttaataaaatggttgaatacacgttacgcaaatattcaaatgccatttcatcattcagttccaagcgtgaaagataaggcaatcctccgtaagtaaggtatttcgtcaaactttgctggtcgtctgggagctggtgaaaaagtaaaaattccgggtagcttagactatggatgtgaaattctatatatcggccggataaataggtggctagttctcccgataacattttggcattgctacccgtgcagaaaatatcacaggagtctttggcttgaaggtcacgaagggtatgttcgaaatgatcaatatcctgaatctcgtcaatgaataaatagttggcctttgccgggttgatttgtgtcttcaaatattgggaaagatcttgatcgttatgaatcattcgaaattcttcatattccatatttatatatatgacgttagcatccgggtgatcggttttgatttcttccatgagttgtagcatgatgtaactcttgcctacacgcctttgaccggtaagtacttttatgataccttttccgataaaaggttttatccttttgctgtataatggacgatcaataatc

SEQ ID NO: 261 - DNA, 6270 bp, Butyricimonas faecihominis
atatatatcaccacacttttcatttagggtgaaaagaaaaagatttttttttctcaaatgcttaattatttccccgtagacataaaaagtagaatagaagagaatgcatcccgagttagattctcacgcaaaaatcgcaaagcaattttcatttgagttttaaccgtattaatactaatattcaatacatcagcaatttcacgatacttcatatcatccaaacaagccatcaaaaatatctttcggcattcatccggaagacgactaatcgtgcgatatagtaattccatctccttcccgacctcctcttccccaaaataagcagatagctcatactctctttcagaaatgttactatacaatcgatcttttcggcactgatcacgcacataattaatcgccctaaactttattgcttgaaacataaatcgatccaattctccttcgaaattttccaaacgtctagaacgccaaatgtgtacaaaacaatcctgtacgatatcctctgcactctccagatctcgtatcaatcggtaacaataaagcaaaagaggctcataatatacatcaaaaagtttctgtagagcaaccctttcatcttgtttgtacaaagataatatctctcccgagtttgccatttcacacgcatttggcacaaaaataatacatattttcgagttaacaagaaaaataagaaatgcctacaaaacaacccacttcataatctcataaggttcatcagctatatattgtgctccgttttcctgcaactctttccgatcccggaatccccacgtcaccccaaccgatgtaacaccgctattcacagctgtttgcatatccacacccgaatcccccacgtaaaggacttcctccttcgagactcctgcttccttcatgatatcgaaaacaatcgtgggatcaggtttcacgggaatcccctcccgttgaccataaacgaaatcgaaaagtccctcaccaaaatactccgggatcaattcccgagtagctgcatgatatttattggaagccacagccaacaatacatgatgacgtttcagcgtcttcaacaattcacaaattccatcataaggagccgtaaagtcagctttatgctcggcatagtaagccatgaaatcttcccgaatcttcaacatattctcatgtgtcctctctttctccggcaaggctcgttcaagcaatttgttaattccattccccacaaaataacgaaaagcaggcaattcatgtgtcggatacccatgttgccgtaaagcataattagtacttgcggccaaatcctgcaaggagttcagcaatgtcccatccagatcaaaaatcaccaactttgtcataattcattcctatatttctttttatatcacaaaagtatacatacatgggaaataaaaaagaggctgcaataacaacctcttttcggcacgggaggagaggttcgaactcccgaccctcggttttggagaccgatgctctaccaactgagccactcccgtatttcgtgctgcaaattaaggtaatttaaacgagaaaaacaagtcccacccggaagtactcgtaaaaatattaccttaaaaatgcttgctatcccacaagtatcaggagttcaagcaacaaattcatccaacaaaatacaaaaccctatgacaattctaaaattaaaccgtatttttgtcccccgacttcaataaaaaaggacatggaaaaagttgtagttggtctcagcggaggcgtggatagttttgttacggcactcctgttacaacaacagggttttgaagttattggtgtccacctgcaattatgggcatcacgggccagctcctcgcaagaaccggaagtcgaggaattgtgtaaacaaacgggcatcaagctctaccggttaaatggcaggcaacttttccaaaaacaagtggtccaacccttcatccaaggctacctttcaggaattacccccaacccgtgcgccacgtgtaacagctttatcaaatggaatctacttcgagacttggcaaacgaactaaaagtacaccatgtcgccacgggacactacattcggattcacccttttgcgaaccattattacgtccataaaggagttgacccgaataaagaccaatcgtacttcttatggggcgttccggaagagatcctatgccgggccatcaccccattaggacattacacgaaaacacaggtaaaggaaatggccaaagaacacgggtttatccgtctggctgaaaagcaagaaagcatgagtatctgttttcttgaaaaaggagactaccgggctttcatcgccagccagccggggacagactcttgtttcacacccggccggatcgtggatgaatccggaaatcacgtgggagaacatactggaatcgtgaattacaccgtgggacaaaagagaggaatcccgtccaagggacaattcccacaatatgtttcacgcctatccccgtccacgaaccaaatcgtcgtgggagataaggcaagcctacaccgaacgacctttactctcgggcaaattcatttaattaatcctgaagaaattcattcacaagacatagaagttaaagtacggggtatcgggctgaacccggaaggattcgcacaactatctttccaacccaatcggacattacacgtacaactttcctctcccgcgtgggccattgcccccggacaaccggctgtcttttatcgggaagaccgggtaatcggtggggggatcgtcctataaccttttaaaatatcatgacatgacattttcagatatactccaacaacaatataaactatccgaggatagtatccaccttctccttaaagatgtaacaaccatctctttcaacagaaaagaacccatcgtgcaggaagggcaacgcaatgagtatatttatttcgtggaaaaaggttctgtccgaggatttatcgaacgggaaggtaaggagtttaccctattgtttgcattcgagggagatatggccgccaccatgccaaacctgtcacaaacaccgacagctaaattcacgctagaaaccctcgaatcttccacgctcgtgcaaatctcccgttctcacttggaatacctcttccttcattccctagaactggcaaactggggacgcaaactgatggaaaagaccatgcaggagtacgagcattatttcatcgagtactactgggccgacaaaggccaccagtatcaaatactgataaaagaatacccgcaactcttacaacgagtttcgttaaaagaaatcgcctcatacctaaacatcacgcctcagtcattaagccggatccgggctcacttgaaataaatcttacacgagcatcaccgctaaacaaaaaacaaaatcagcatctgtgctgtcagtacccgcaagaacatcgtgagcgggtacaccgtggcataactcacggcgggagcgtcatttcccacgataccattggaataagccaatgctggcgggtctgtcatacttccagccattaaccccatcaacgtaaagtaattcactttatatatggaacgggcaataatcccgattataatcaaaggcaccacggtaataataaaaccataacctacccaagcataccctccgccatcaataatggtcgacacgaaaccttctccggcccccaacccgacacttgccaagaaaagggatatacctacttcccgcaacatcaggttagcactcattgtcgtgtaagtcaccaaaccgtattggggaccgaaacgactgatcaaaatagaaataatcaatggacctcccgctaatcccagctttaccggctgaggaataccggggaaagtaaacggaatacttcccagtaaaatacccaagaatatacctaaaaatatggctaccaagttaggctccctcaaacgacgcaaagagttacccaacactttcgccacgttcgtaacggcagcttccggcccaacaaccgtcaagcgatctccaatctgtaactgcaaattcggtttagctaccaaatccaccccggcacggtttacccgagtcacgttaaccccgaaacaattccgcaaccgcatctctcctaacatcttcccgttcacctcccccttcgtaattgcgatccgacgagataccagttgtttatccaattgttcccaagcaacgttgacacgttccccaagaaaagctgcaatcgcatcaatgtcctgtaaagcagccacgacaagcaatttatctccttcacgtagacaagtctcggaagaaccgatttcgatacggtcatcctcgtggcaaacccgtgaaaacacgaactttcgatttatcaaacgggtaatttccatcaaatccttaccaaacaaagccggatttgttactcgcacggaaaactgttgagccccgttcgcacgctccccatcctgtcgctccaaatcctcgttctccttctcgaacttcacccggaagatcacccgcatcagcagaatcgacccaataataccgatcactcccaaggggtaagccaccgcatatcctaaagcaatcgtggggtcatttacccctgccatatccgaataagcttgttgagcagcacccaatcccggcgtattcgtcactactccggaaaggataccgaccatcgttgtaatcggtaatccggtcacaacatgaataatatatgtggtcaccacgcccaagaacacgatgcccgcggccagcatattcaaggttaagcctccttttctgaaagaagagaaaaaaccgggtcctacctgtaatcccacagagtacacgaataaaatcaatccgaattccttcataaaatgtaaggtatgaccgtccacccgcattcccaaatggctacaaataatccccacaaaaagaatccaggttatccccaaagaaatcccccaaacctttacctttccaagcacaatccccagagcgataacgattgcgaacattaacactgaatgagcaattccctgtccaaaaaacagttcacttaaccaagacatacttattttagattttaaattgagaaactcgttattttatccctctgaactctctgggtctttcacttttttatcgatagaacggcaaaattcaatatcatcccggaacaacttacgataagtaatataagtctgggattgttttgcaccaatgtaatccatcaagtgcatcatctgcgggttaaaatctccgacccaactcatatccaaccaatcatacgtcttctttgacaaaatgatattcttacagaaagcataaatcatagcagcctccactccacgcccttggaattcggatgcaacaccaaaaattaatcctaaggccacacgcccccgcttgatatgacgataatacaggaatttcaaaatacccaacccgctaatcttaccattcacgtgtttcacgatatagttcaattccggaatcatgataaagaaaccgataggttcccctttatagtaagcaaaatacaataaatcaggatcaagcacgggtttcagggtcttgaataacacctccacctgttccttatccatccccccgacaccatgcacgttcaagttccacgccttattataaatggtcaggaaagaatctttcgcctgccggggagtcatttcacgataggaaataatccggtaatcttcatttttcaacaaccgttccgacttccagaccactaccttggaaagactttcctccaccaagcgagtccggtagatatattgtttgaaatagtcacggaacccgtagttctcgaagaacggaacataatacttatgcgtgtagggcatttggaatacaggcggtttgaaaccatcgaccagcaatccccaccactcgttacgctctccgaaattcaccggtccttccatggactccatgcctcgctcctccaaccacgaacgacaacggtcgaacagcatgaaagcagcttcctgatcattaatacactcgaagaaacccattccccccaccgagtaggaatccaaatggcaggaacttctatcaataaaagaagccacccgaccaacacatcgacttttctcatcccgcaataaccagcgggtacactcgccatgcttgaaaaacggattctttgccggatcgaaaaccttcgtgatgtcattatctaaaggccgtacccaattctcgtcattcttataaagggatacaggtagcaacaaaaattcttttgcttgcttttcgttcaaaacctcttcaatagtgtatttcatat

SEQ ID NO: 262 - DNA, 6258 bp, Butyricimonas faecihominis
aattaattgaaaattgaaaattgaaaattgaaaattacttttcactctccaataaaattaaccctattatttaaaattgtttcaacttttatctttcttgtttctcttgtcctcgccccaattcaatttattccgtaacgtgtcgtaataactatgatcaggcattttcacaacattcattttaaaatcgcccgaagatataaataattcgtgattatccgacattctttgcatacgagaatcagcactcaacatgaagtctcctgaacgactctcaacttttaaacggatttgcacattaccgggcaaaatcaagggacgcatattcaaattatgcgggcttaccggagttatgatcaagttatcgcaaccaaaagccacgatcggtcccccgcaacttaacgagtaggcagtagacccggtaggcgtggccacgatcacgccatcagcccagtatgtggtgagatattcttccccgatataagcatgaaccttcaacaaagaggaacgttctgtcttcaatacacttatctcattcaatgcataattaaattcagcaaaaggattatctttcatctcgaatttcaccaacgcacgctgttccacgtcaaagtctccggcacataaccaatgaatagcctgaggaatctcttcttgagctatattagccaaaaaacccaaccgcccgctattgatgcccaacacaggaacaccatgatttttcactcgcatcgcagaatcaagaaatgtcccgtctcctcccacgctgaacaaaacatccgtatcccgatcaacatcctcctcataaaacgcttgaaacacatcagaaataccacatttttccctcaaaaaatcatagaaaggtttataacaagtcaaacaaacccctcgctcattcagatcacgcaacatttgtttgaaataaggataaaactcttcatgaatcacccgtccgtaaatcgcaactttacttatttttgaacacatctatttattttagattcaattaatttaaaacttcctacatttccataaacttcaacaactgcccgtaacgatctttcatctcttcattcatctcttcaccggaaacaaaagtatttttgatcacataacgataacgaataaaagtatccagaatcggttctatccgggccgtattcactttaagagtaatcaccactttattagaatccggcatacacgtaacatagcaactcaacaccttcgcctcgttatactccacgatttgggcgacctcggccaaagaataatcaattttatttacttccaacacgataattccgccaggatcgtctatacacaaaagtttatcaatattatgcaagatgtctgttaacaaaatagctccctgatatacctcttttcggttcaaaaccggtaccaccgacaaaagccgtgaagaggcaaccccgataacatcatacatatgtacatcttcgtaaacgaaagtcatttccctgggtatatccaacttaccgatcggatcatgaatactcccgtgcgcatacatgatttcatcagataacaaccccacgtacgtttctccatccaagacaggcaaatgagacacccgaaacaagtccatccaccccaatgcctgggcacaagtatcatccttcttcaataccggtacaacatttgatagtaaacttgatgcgatcatatttatttcatttctcgccctaaagatacattattttccccagtaaattccacccttaaaataattttcaattttcaatatcaccgttttcaattatttctatatttgccacgtaaatttaaaaacagtgaacatcatgttaccaaaatttcttattgcagacaattcccaggaagcaccagatctagtatatgttgtgcacacggaaaagcctcaatgtattattcaatgtgacatggatggcttttacagcaaccagaaaatttactggattgacgaagagcctctctgcacagacgacattgaatctctcatggaagaagcggaagaatttttcgaaaccgaattagagaatcaagaagaattatatgacgaagaagaagacaattaattgtcttctttctcgtataaataacaagctaacaagttacaagttcacgataaacacccataaccctcagagtcagagactcacccggcagcctgcaacgcaaaagacaaattttgctttctgcacaataattcgtaacttgcaaaactatttacgtacttacaaacctgaaattatgtacacgaaaagtgatctcaaacaatttaaacgcaggggaataaaacccgagcaaattgaaaaccagcttgaaaatttcaagcaggggtttgattttgtacagattcgggatgcggcaacaataaacaacggaatctacggtttgaatgacgaacaagccgatgaattcatccgcatcttcgaggaaagaatgaattcattgaaaatcgtgaaaatggttccggcctccggttccgcatcacgcatgttcaaaacgctaaatacgtttttcaacacgtacacgggtagcgatgaagactatttgaaattccggcaagacaaggaacccggaagtatattctcgttcttcgagaaattgaaagaatttccattctacccacacctaaaagaggctctttacaaagatcgccttgatttagacaaattactctggaagaatcaactcattgaaattctagaatacatccttacccccaaggggcttaattacaatgccacacccaagggattaattgatttccatatttacagggaccatatccgcacggctgttgaagaacacttggtagaagcggcactctacgccaacgacggtaaggaagctcatattcatttcacggtatcagaagaacatataggcaaattcaaagccctcatgaaatctgttctcaaaaattaccagaaagaattcaacttgaaatacgacattacgtattctgtccagtcgccagcaacagatactgtgagtcttgatacggaaggtaatctcgtgagagacaacgagggaaacatcgtgttccgccccggtggtcatggagcattgattcataacctcaatgacctgaaagaagacctaatcttcatcaaaaacattgacaacgtggcacccgatcgtagcaaggcagacacagtaaaatacaagaaaatccttgccggagttttgttaaaaacacagaaccagattttcaattacatgaaaatcttaagcaagaaaaacagtattacagacgaaaatttgaatgaaatcgagcaatatatctacgaccacctcggttataaacccaaagagggattagttcatactgaccgtaaggaaagagtcgcttatttaaaacaattacttgatcgaccattgcgtgtatgcggaatggtgaaaaatgaaggagaaccgggtggaggaccgttctgggttgaagaccacgaacatgcaacacgcttgatgatcgtggagagcgctcaagtcaacctgaaagatcgaaatcagaaaaaaatattcacccaatcaacccactttaatcccgtggacatcgtatgtagtacctataactataaaggtaagaaatatgacttggctaaatacatcgataacacacagggattcatcaccagcaaatcactaggcgggaaagatattaaagttcaagaactacccggattgtggaatggtgccatggccaactggaacacgatattcgtggaagttccgctatccaccttcaccccggtaaaaactgtctttgacttgttgcgttttgaacaccgtaacgtgtttaaagtagaataaatgaatttagatttacgatttatgatttcaggtgattcataaatcgtaaatcaaaaatgttgattcgtgaaaggaaatctaaaatttaaaatttaaaatcaagaaattaatttgttgttcatggagaagaaaaagaactacttactattagtacttagaggatgtgccatgggtgccgcagacgtaatcccgggtgtttcaggaggtactattgcatttatcacgggtatctatgaagagttgatcgagtcgattcggtcaataaacctgaaagcattacgtttgttgggaaccttccagctaaaagagttttggaaacacattaacggaaactttttaatttctgtcgttgcaggtattgccatatccatattttcactggcaaaattgatgaaatacttgctagaaacccacccgttatacatttggtcctttttctttggtctcatcattatttctgccctcatggtttcaagagaaataaaaaaatgggatatactaaccatcacctcgttaatcgttggcgccatcatcgcgtacacgatcacggttctctccccaaccagtactccgaatgactggtggtttattctcctttccggggctatcgccatttgcgccatgatcctaccgggaatatccggtgccttcattctgttacttttagggaaatacgaatacatcattaccgccgtcagcgaattcaacattcccgttctacttaccttcttagttggagctgtggctggtatagtcgctttctcacacttgctatcctggttattgaaaaactatcatggaatgacagtagccctattaacaggattcatggtcggatcactcaacaaaatctggccctggaaaattacagatacagaactggttaacgggattgcttttaatgttgaaaaaaacgttctccccaataccttcgagcaagttaacgggagcgatcctcttgtatggcaggcaatcctcatgtgtatcattggtattttactcatctggggtattgaaaaactagccgtagtactaaaaaaatagttcatcaagggtttataaagttcgtcaggttcataaaatgaccgtgtctttatctgccgtaaaacagttgtagatgaaatactccatagggaattatgcctcccgaactttttaaaccttataaaccttacaaactttataaactcccatgcaacttttcggattactcggttttcctttgggacattcattttcaaagacttacttcacggagaagttcaaggcagaaaaaatagatgcagaatttgtgaacttcgaatctgataatattgaacagacactacaagtcattaaaacaaccccctcgctaaaaggatttgccgtcacgatcccttacaaggagaagatcattccctatttagaccatatcagcgaggatgccagaaaaatcggagccgttaattccgtgaaagtagaacacacgatttccggttccatcctaaccggatacaacactgacatcttaggtttcagagaatctttattagaatttatccagacaccgcctacacaagctttacttttaggcactggcggagcgtccaaagccgtccggaatgcacttgcctctttgggaatagaagtattcacggttagccgtaccccccattcttcctctgaaatttcctacgaccaagttgcccattacctacccaacactcctttaattattaacgccacccccgtggggatgtggccgtatgtaaccgattgtccggacattccttatcatcttctctcctcaaatcattatcttttcgaccttatttataatccggaaataaccgaattcatgcaccgtggagagcaacaaggagcacgaataaaaaacggcttacagatgctccatctgcaagccgattattcgtggaaactctggactacttaatagttcagagtattattttaagaaataagctacttgtttcgcctgagtcccctcacatactttgacaggagtcatcggcacgtcattgtaaggaatgaattccatgacttgtaacaaagcatattgttcatcttcactacaataagcctccaagcttaaattagattgtccggaacgggtcaatgattgtaaatcatcatacctattttgctccaaaatatcatacaatcgtgaggactgatttgcagccacatacactttatgtttcttcaacacctttcccgttggtttgtaaacgtaacgctctttctttaccaaaaatgccacgactccccatgctgcaacacctaaaccgatcataataacaacagaagaaagcgtatcactctgagccgtgttaatataattcgcaccataccaaaggattgcagcacccaagatcaacaatgccaaaggctttataggagattttttctttttttctattttatctttatctacattca

SEQ ID NO: 263 - DNA, 6252 bp, Butyricimonas faecihominis
atataatagttatttttgtcacactgcttatgctaagttcgtgtgaaaaagaggagagtataattcatgatttgaatatttctccagatgagatttcaaaaattgaattgcgtgcagatcataagacgttagtccctaatggagttagtaaaatgggattccatacgtttgtatatgccaaaagaaacgtgatgtcttatggccgggatgaagagacaggagagttttatggtaaagagattgaagaggagtttttagttccagacgatcaaattcctgctggctatgtaaaagtgtatgaccagaatggtaatgtgttggaagatggttattatgcaacgacgagtgatgctcccggaacgattctgcaattttatgcaaaagggggaaatatggaaagtaatcgtctagagattacaataagggagttacctgaagaggattatgaggagattgtgattcctgttgtctttcatgtactcgttcctccggcaacagcggctcctgcctatgatttaagcgtggaatttttggaagaacaacttcagcgagtttctgatgcctttaatcgtaagataacaactgatcctaatgcaggaaacgctaaagtcgtgtttaagttggcaacttatgatcaaaatggattaaaaatgcaggagccgggaaagaatatagagaatatttcagcatcagattttacaaatatgggaacttcttccaataagactaaaccttatttgtcatatatattgacaaaatggaaacgccttatttgggaccctaataaatacttgaatatctggttagctaagtttaccacgtctacttcagcaacgggaacttctacgtcgtatcagatgtggtctcctaaggtgatgcatccggattatgatttggcttctattccgggtttggatttggaacataaggagtcttttactttagatgatgttgaggactgtcgggaagttggtttcatggtgaatctggcagctctttacacgccaacagcagtacaaggatcaaatgaattcagtttggctacccctatggcagaatattttggtattcttcaaacgaggtgtgatatgtatgagtatttgaatgaagatggtgatagtgattattgtccggatacttatagttttgattatggtttttatccttctgtgtttaagggtaataacttggatggacaaccggaaaatgatccaactcgtcctttggagtatttcacttcattcaatgtgatggatatgtatagttacaaaaattcactttctatcgatcaagtgaaacgcttaagaatggttttgcaacaatgtccttctcgctgggcctataaatctgattgggcttttacgggaggaaattgatgtttgtgtgtagtgtttaaagactcgattctgggtcttgtaagtcgaaatcgtaccttctgtggtacaatttatactgaaaaacgtaccttcaacagtacgtttttcttatttatcgggtatagaaatcgatttgtttcttgatagcccggatgcaaacggggcagaagtcattaccggatagggtgttcatcaaacagtcataacgaggacggtaaacgcccttggacacgtaaccacctccttcataggccccgagtttcttgggattttggggatcgtaggtagtgggaacgggagtatctttatcaagcatatctttccatttcttgttaaagtttgtcagtgtggtaagattagcctcccaaggttccacgttggtcgggtacatatcattataactgctaccgacttccacgtattcgtctccaagaccgagaaacaagtggccgaactcgtgaacataaaccttggctgcatggaggttaccggaaatgctgataccgtaatggttatagatggctccaccaccatatttttgcgtgttggcaataatgtagatgaagtcgtaggggacgttagcggataaatcccgtaaacttttattatcgtaggtcatgatgtaacgttcggaatcgaaagtgtaaaaggaagaattcaggatggtattcttccaaatgtattcaccgggaatatcgacaccggattcttgtgaaggggcaagaacggcccggatattaaataaaccttgattttctttgtaaggagaaaggctgaacagaccttccgcgaaaagtttgcaatcggctttaaatttgtccatttcatctgccgtgtaaccttcggggagcaggacgatgtccacccggcgtgacgggtttccagtgtaatgcacgtcataagtcgggtactgcatccggcgatcctttttgataaaatagctatcaacatccaccgtgtattcaaatttctttacgaatttacctttcttgttccgggcggatatttcaatgcgtacgtcatttttcgggaaaggcatgactacagtctctgaacagcaacgttgagttgttttcgcttcatcggtggtttgccattcccagaaaagagtgcaatatccccgggaatagatgagttggttggaggccacgtcgtacacgttgagataataattcccgtagaacattgtatcaatgaggttagttttcgaaccgccccagtaaggttcctccaataactcctcgaaataaatttcgtcgtgctggctattcccgcaatgggcgtaatccatacgtaaagtcttgttgtgaaagtatttgtcgaattgtgcccaggatagatttgcttgtagcaataatatcatgcagggcaagagtgctatgattcgtttcataaatttgttttattatgtgtttatctttgtgcaaagatagttttttactatttttatacacgaataaatctgtataataatccttagggaaaatggttcaagatgagttattaatagagcagttgaatcaaaagcaggtgggagcttttaaaatattgtttgaccgattttatcgttatctcgtgctatatgccatgaaatgggtagagagacaagagattgcggaggatgtcgtgcaggacttattcgtgcaggtgtgggaacgggatacgatttacagttcttactatggttttaagaatttcttgtataactcggtgaagaatgcctcgttggattatttgaaacacaaggaagtggagggaaagtatgtgcgttacacacttcggacatcagaggcgggcgaaatgcctgaattggaggttatgaaagatgaggtgtaccgccgtttataccaagtgttggacgagttacccaaacggtgccaggaagtatttaaacattatttggaaggaaaaaagaatagcgaaattgcggaaattcttcaaatatccgaattaaccgtgaagactcaaaaacggaatgctattgtttatttgcgaaaaagattgggtggggtatatgtgctatatgccttgtttaaagtgggtttcatgtgattggaaaatattttctaaaaaaagtcgattttttatactccttttttttgctcttgtcgtctttggtgtaaaataacaaggatgatgaaacattacgatgaatatatcatacaattaatccaactttatctcgtgggggatttatccggggaagaaaaagtgaagttggaggagtgggttagtcaagatccttcgcatgaaaaactttttaaagagatttgtgatgaaaagaatgttgcccatgattttggtatttacgagaatgtgaataaagattctgcatgggagaaggtcattttgaagggaaacatcaaacagaagcataatacccgtcgtttagggtggtataaattcgtggctgccgtgatgattcccttgctagtggtggcagcgggatattttataagagaaacgaaaccgggtgccaaacaaaaaggttcggaattggccagtatagagcccggaaagagcaaggctattcttcggttggctgataatcgggtgattgaaatcacgagagaacaagaaactcgttttgatgtggcagaaggtatcgcggctaccaataactcgttaggaatggtttacccggagcaggtggcaacgggaaagacggaatataacgtgttggaagttcctcgtggaggagaatacacggttaccttgtccgacgggacggttgtttacctgaattcgggcagtgaattgcgttaccccgtggctttcggggctgaacggcgagacgtgtttctttccggggaaggatattttgaagtggcaaaagatgcaaaacggccttttttcgtgaatgcggataaattaaaaatccgggtttatggaacttcttttaacgtaaacacgtgcaatcttgcaaatgttgagactgttttggtcgagggaaagattggtattcaagaaacgaattcggacattgaatattcggtgatgccgggacagttggctctttataacagagagaaaggcactatggaaattcgggatgtggatgtgcggccttacgtggcgtggaaagaacatgagtttatgtttgataacgagagtttggaagagattatgaacacgttgtctttatggtatgacgtggatgtgttcttccagacggcaagtttgaaacaactgcattttaccgggcatttgggacgttacgaggaagtttcccatattctcgatgctatatcaggagtgactcaggtgaaattctctgtgaaaggaaggacaattatcgtgatggaataaaagaatagcggaaaatgttacgagcatcttccgccattaatgataataggacaacaggctaatgttacgagcaatgcctgattgtaaatactaacattctaactacaaaggtatggaaaaaattctattatgccttagggtttaccgaccccatggacaaaaattttggaaaacgatgaagctttttatttttttgatgtgttgtttcacattttctctttcggcaaatagttttgcccaacaggagaaagtcaacttggatctacaaggagtatcgataaaaacgttatttagcgagatccagcgtcagacgaatctgcattttatttttaacacggaacaaacggaacagttgaataaactgactgtaaaagcaaaagaggagtccgtgaaatccgtgttggatagagtttttgagggaacaggttttacttacacgttccgggataatattatcatggtccgtttcgaagggaaaagttccgtgcagcaagcaaataaggagatggaaattcgtggtgtagtgaaagataaaagcggggaaccattaccgggcgtaaccgtgcttatcgtggggacccaattaggaacggccacgggaatggatggtgatttcttgttacgggttccggaacaggacagcgtgagactgcgtttttcatttgtagggatgaaaacgaaggatgttccttataagaaaaatcaacccgctttggttgtcgtgttagaggaagaagcggagagtatcggggagatcgtggtaacgggataccagcaaatcgagaaacgtaatttgacgagttctgtggtgacggtgaaaacaagtgaactaaagacaattggagcttcgagtatcgaacagatgttgcaaggtgtggttccggggctttccgtggtgaatacatccgcggctccgggtgcggctcctaagattcgtattcgcggtacagcgaccatctccggtaatgcagacccgttatgggtattggatggcgtgattctggaaaattccgtcccggtgacggctgctgatttgaacagtccggacgtgatgaatatgttcaattcggtgattggtggtattaacccgaatgacatcgagagtattaccgtgctgaaagatgcttctgcaactgctatttatggaacacgtgctgccaatggcgtgatcgtggtcaccacgaagaaggggaaggccaatagttttaatatcgcgtatcaacacacctcaaccctaagtattcgtccttactacgataattttgatttgttgaattcgaaagaacgtgtcgctttggcttgggagaattatgtggatggtttggatctttggggtggtacttattcagaagggacttccggcttagagggattgctaaatagctacagtttaggacagatgactaaagagcaagtaaatttgatggctaataaactggaaggtatgaatacggattggtttaaaatattattccgtaatgcttacacgcaaactcataatctaagtatttccgggggaactgagagaacgaattattatatttctttgaattataatggagaagag

SEQ ID NO: 264 - DNA, 6249 bp, Butyricimonas faecihominis
aaattaattgtttaacaataatccccattcagaataacggatcctttttatcccgtttgagggcaagctgtcatgtcttttgtcagtgattagcttgttaccctccatgcagcaaatgccaaacctttcgataaataaaaaaatcagataaataggggataattccggtatttatctgacttttgtaaaagtgtagtaaagtgattgattaccagtattttgtttctttgctagagagatttacaaggatgttgaagttccagtcaacgagactgtcatctgtcactgtcatattgtcacgaatgcgttccctgacaagtttaatccattcagactgcatttttgtcatgtcaaggtagttcgaatagtattctttctcttctccttcacttcttttttttagttgtcgaagttcttctatctctttttcagtgtggcaatgtatcttgtggattatgtgaaggaacatgataatgagaagacaaactcctttcgatattttgttatcatcttttgcagtgctacgatctttgaagaaccggtaaagttgaataatgatggtgttcgtaaccttgtcttgtggcgcacctctacgtggagaattatcatccactagttccggttcacaatattcttgaatgtactcttttaaatgctgccagaaccaattattcttgttagatagatgtatgtccccgtaggttgtttttatttgtatcggttgggaatttttatttttatatgtaagccattgttgattctcttggatgaaccggagaaggttattcatatcagggttcacgtttaatagaaattcttccaacttctcatctttcatggaacgttcaattgtttcttgtgccgggttacgggtgatgaaataagccaatagccagtatatccaaagtaatgtttggttacattcaaaatattcatgatttgcttgaaggatagtgttataattttctgggatcgtgggattatgaaacactagcgggaatatgttattttcctcgatgtaatattgccagtattcagcgaatgattttgcggtgtagatagtttcatttgcggagggattaagtttttgtgtctcgtaataaaagaaggtgggaaagaatatttctttttctagcctgaaatatttattcaagagtgggtacagggcccctacaatattcccgtttatccaaacaacatatccccagaaagggtctttttcagcgattccttttactttacacatgacctaagatttttccaaatataaatttttttgttggtaaaaaaaaataacctcaaatccgaagataagaggttatttgtgttcataataaattttgcattgctgcatcaatctgggtgttctcaaagctatccaaataaatttgggttgtttttaaatctgaatgtcccagtgattcagatataattccaatatcaaccccagacctttttaaaacagttgcgaatgtatgtcttgctacataggttgttaaattgattttcaaattcaaggctttactaatcacctttagttttctattaacttgtttcaacaccttttgtaccctatctgcttgttgttgttctgttatatggatgtttctatccaaaataggaaagatatagtcttctgctcctgcatcctttttaatgtatttatttagtatcttcaatgcatctggtaatagaattgtattcatatttttctgtgttttatgccttgaataataaattcgtccattatcaagatcgcagtatctcaatgtggctatatctttgaaattaattcctgctgttaggtaagagaacatgaatatatcccttgcaaactccaaatatggagtgggatatttgattaaagtggacaaatcgaactctttcaatttttgtacatcttctttgtgtatggctcttttccttgtttgagtccataatttcccaactttgaactttttgaatggggaatcttcattagtaaaaactccttcttccaaagctttattataggtagatttgaaacaactgaattgtgttgcaatgctattgttcgctaatccctttttccttaaataaacctcataatcttttaagaattgaaagtcaatatctgtaaaaggagtattcattggtttgaatttggatagggaggacaaacagaaatagtatttagatgcagaactaagtttacctatttcctttaattgggaaactaatttcatgaaatatttttcaatagtgattgtcttctgtttcttttcagagattccaagtaaatcatcaatagtaaattctttgtcttgtatgcgataattcaaaatctttttatttaaatcttggatagtggtgtcaataagaaattgaatctgctctctattgggagtttcatctttaagtttattgttttcaaaatcccaataggcaatattaattttcacgcctaaacttacttttttgcttttatagttttgtgatatttttattgcaataggagcttcattttgtttgttcattttgtctttacgacagatcacagtgagatgtgtttccataaatttcgctaattgcgaaactgattactgacaatataaaataaaatgggggacaaatagggggacaaataaggggtaaaatcacccttttttccacaaaatcttcttttgtattcccaaaaataagaatcttacattgaattacaatgtcctgtatgataaggatttgtttagtgtaactatctgaatggtagtataataaaacaaaaaagcagccaatttattgactgccacctttgagctgttaatgggatttgaacccatgacctcttccttacacgagagaagaggctcgtgctgagatggaaaaattctttcccatgctgaagcgttggaaaaattgattgtcttgtgagcaaagttagatatgtataattagttatcattgctattctggatggcgtataatcttattattgtgtgggctgaaaattctaagaataaagttttatatttgtgtcattaaatgaacgtttaataatagcctattttggcggcagcgttcacttatgtaggaatttgtgcaacttataaataattaattaccataagtttgaataatattcgtttttgcgattttattcggaagttttatattattaaacgttcattttatgacatcaaaagttccaataaatcaagatcgtttaataaatggggatgaaaaagaatttaagtccttgtttgatttgttgtatgttggaatggtgcagcaggcgacgttctatacaaatgattttgctgtagcagaagatgttgtgcaagagatttttgttcgtttgtgggaaaaacggggggagttgaaaagtgtccagaaccttgaggggtatctgttgctatctgtgaaaaatcgttgtttaaattatttggaacatcagcaagtggtggataaatataaacaatattgtttgttgcaggaaatacaagatgatgatgatgaagatcctgaacaattcatagaagatataggaaaattgttggataagttaccggagaagcgtaaaatggtattggaactatgtgtgatcgagtcgaaatcctacgctgaaattgcagatttattaggtatttctttgaacacggtaaaggatcatgtgaagaaagcctacgctttcttacgagaagaattgcgtagagaagtttcttttccggtattattttttgccctctatttcaaggggaaagtgtatttgaataaataatctttaatttttttattttttttgagccactcgttttatttcttctcctgtctttagggtataacagccagaaataaagaaaatgaatatagaagaaataataataaaacggctttcggaagaacatttgtcagaagaagaaagtgctttttttgacaagtggtatcaaaattcttccaaccgggaatattataatgatttactgaagattcgttcgggcatcatcgcttctcaggttaaggagagaattgacaagagaaaggcgtggaatcaagttcgtccagcacgtaaaatatccctgatacggactttgttgaaattcgcagctattatgatattacctttgagtctcggggttttccttctcatccgtgaaaataaacaggaaaaagtggtttatgctgaagtgcccgtgcaaccgggtaaaaagcaagccgtgttgaccttatcttctggtcagcaagtaatgcttgcggacacgatcgttcacgtgaacgagaaaggaatggtgatttcaaattttccggataaagaattggtttataaaatcatgaatgataccatgaagacagaaactatttacaacacggtcactgtccctcgtgggggagaatataagctggtgttggctgatggtaccattgtttggttaaactccgatagccacattcgttatccggtgacattttccggtaatacacggcaggttgaattagagggggaagcctattttgaggtggctaaagatgtggaaaaacctttcatcgtgcgtatgaacgagtataatgtgagagtgacaggtactcaatttaacgttcggaattattcgaatgagagtctggcgacaacgctagttgaagggggagtacagatcgagagaaagggaaaggtagacaggttacgaccgggacaacaagctgttttggaaaataatgaaatacggatacgggttgtaaatgttgaagagcaagtggcttggagacatggtgcgtttggtttcacgcaatgccgtttggaaaatatcatggaagagcttgcccgttggtatgatgttgacgtgttttatatgaatcaacaggtaaaagattatcacttctccgcttggtttaaacgaagttcttcgataaacgaggtgattaatatattagaaaaaacaaagaaaataagtttagatttaaagggacggattctcacggtaaaagatataagtagaaattgaaaataaaacaggaagcttgcgccaacatgcttcctggatgaaaactcctcgccaaaggaattttaatgttaaacttgaaaaacaaagttatgaaatttttatgtagaaacctaatctggattatgattaaaatcaagctagtattcctggtattgattttgggcttctctagtttgaatgcgaaagtgtggtcgcaacaggatcggattgatctggtatttgagaacatgaatatggttcagctttttgaacagattcagcaaaagaccaatctaaaattcgtatttaaccatgaggatgttcaaaaatataccgttagtggaaaagtacattacaagacggtatcggagattcttgatcttgttttcgtggataaacctttacggtacgagattacgagtgatcatgttgtgattttttatgctcaacaacaagatgatgagaagaaagttactggagtaaaggtaaaaggtacggttacagacgaggagggtattccgttaccgggtgttacggtaatgataaaatggacatcaataggaacggcaacggatattgatggaaagtttaatttggaagtgcctcaatcggatacgacaaaattgattttctcttttgtgggaatgcagaattatgagttaaagatctccaagaagaaaacagagtataatgttgtgatgaagtctgataccaaggcattagatgatgttgtggttaccggatttttcaccaagaagaaagaaagtttcacggggtctgtcaagacaatgaccgttgaggaaattaaggcggtatctaatacaaatttggttagtgccatttcgatgttaactcccggtatgcgaatggtggaaaataacgctttcgggtcgaacccgaaccggatgcctgaaatcgtcattcgagggacttcatctctgtccacggaagcggaccaaagtgcgaaccagccagttattatgttggatggtgtagagatcacgatgcgagatttgtatgatattgatattaatgatatcgaacgtgtggatgttttaaaagatgcttctgctacggcactttatggagaaaaggctgctaatggtgttattgttattgaacgaaaaagagtgctgaatgataaattacgattgtcctataatttggatggagcattagaggtccctgatttgagatcatacgattatctgaatgcaaaagacaaattagagtttgaacgtttggcggggttatataatttttctttgttgaatgattttgaagaatataatag

SEQ ID NO: 265 - DNA, 6234 bp, Butyricimonas faecihominis
cattaaatctaatgtatcgccataaataacgcaaaacgatctaaattgttacactaaaaactattcatcatcggagaaatgaatcaacacttttcgatacgtgttgaatatcttcgctttagaaacaaaaccaatatatttatgatcttgaaggacggggaggttccacgctttcgaatcctcgaatttcttcataacaacctccatcgagtcgttgatgtcaatcaccacggaaggcgttgtcatgaaatcccgcacgtaggttttcgaatacaattcttgattaaacatcactttacgaatgtcatccagcaagacaatccccaacaattgctggttggaattcaaaacagggaatagattccggctcgatttggaaaccacctttaccagatcacctaatgtcgcctccacctcgatcgtcttaaaatccgtttccaccaccttgttcaatttcatcaaagtcaacacggctttatccttgttatgagtcaacaagtctccctgcatggctaaacgacgggcataaatagaataaggttccatcccttggctagtcaggtaagaaataaccgaggtcagcatcaaaggtagaaataaggcataacctcccgaaatctcggcaatcaagaacatggctgttaacggggccttcatgacaccggacatcgttcccgccattcccgccaagacgaaatgactgggttccacgatacggattccgctcatattaatcaacatcgccaacaaatacccggcaacaccacccgtgaacaaactcggagcaaaaacaccaccaacacccccactaccattggttaaggccgtggcaatcacttttacgaatatcaacccaaccacgaaaaggatcatcatccaggcactatcccgaaaaccgaagaaataggtattattcaataacttatcggaatgtccggccatcatgtcatccaaagccgtgtacccttcaccgtatagaggaggaaacacgaaaataatgacacctaacaaggctccaccgatggctattcttttccacgtttgcttgatacgctccagaaattgttccacccggagattcatccgaacgaaatacacggacaacactccggcaaagatgcccagtacaacataatacgggaaattagccatcacgaatttatccgtgatctggtaggaaaacacgaaaccatcccccatgaggaagaacgtaaccacatacgaggtaatagccgtgaacatcaacggtaccaacgaggccatcgtcagatcaagcatcaacacctccatcgtgaatacaatcccggcaatcggggctttaaagatcccggcaatggcaccagccgctccacaaccaatcatcaaggtcatcaccttgtagttcatccgaaacaagcgtgccagattcgaaccgatggacgccccggtcaacacgatggtagcctccgtcccgaccgatccaccaaaaccgatggtcagggtactggcaatcatcgaggtatagttgttgtgcggcttgatcatactgttgcgacgggaaatagcatacaatacctttgtcacaccatgactgattccctctttcacgaaaaattttacaaataatgtcgtcagcaatattccgataaaagggtatataaagaagagcaagttaccactgtccacctgcatccgttccgtgaaaaacatatgtgtaaaatgtaccatatttttcagcacaactcccgccaagccggtaacgataccgaccagaatactcaacatgacaataaattgcttttccttgatgtaacggacccgccacaccaaaaatttacccaataaccccttttcgttaatcgccgccatgatctaaaagtgtatcaaacttattttttcattataccttttatcgaaccatattgcgggtagaaatcaatggaaataccttcgttgttgatgacatccaaagggaattgcttgatgaatccgagttgtggaatgacactccgaacagtcatcacggtctcttttcctttcagcaagcacaaatcggcaacagccggttcacgataagatagagacggaaccggacgggaattcccagcctgttgggcatctttcttcggaacatagatatttttcaattctacaatataagggatagcagacacgttgttttttgccgtgatcccgtcgttcgcagaaaaacggaacaaaacgatcgattcatcggctttttccggaataaaagagatggttttaaccacttcacgggtttccctttttcccatgaacaaactcatgtaatttgcctcaagttcatccagagcttttaaagcctctgccgtggccgaacctccggccaataattccaatctttttttacgaatattgaatatctctgacgtgatctcatccacgtaatctttattttcttttaacacgtgacgttctatcgggtcccatacccggcgcatctctccttcaacttccatctccgtgaaattggaatcaagtacttccttctgggtagaacgaataccgaaatacacgtaattaatacctgtccccacgcttttctctttttcctcgtaaacaatctcttcgtcacgagttcggttcgtgttgccacttcccacaccggctaaaaagccttcaggagttacattcaacaaaatagagttatattctccgatagcattcacggtataagaagctttcggatcaggcaaggcccgcggaataaatttgatattcttaatcgtccactcttcgccttcactcgtgatctccggagaaacacctaactgttgttcggcatattgccggaaaggccccggaatcaaacgactacattccatcgtaataaccacgtcgtaactgatctttggtaaagtataatcaactgacacctgcgtggtcaactctctctttttctgtcccgaaacagacagggatactaatcccactaacccgattataaaaaataactttttcatctttctatcgctgtttagccatattatatgtttccatctttttccacacccaacccagtttatcagcaatgtccccggcacgtgttcctctcattccctgctcctctgcagccagatctccagctaaaccgtgggcatacactccaatcatagttgcatctaatggagaatgaccacttgccagtaaagcggcgataacacccgtcaacacgtcccccgctcctcctttagccattcccgggttacctgtcatgttaaagtaacattcaccctccggggtagctattattgtatgcgcacctttcagcacgacatacacttggtgtagacgtgcaaaggtgcttaatttatttaatctatcaaaatcatttacactttttcctgctaatctttcaaattctttcgagtgaggagtcagcactgctccatccggaagaagttccagtaatcttgaatccgctgccaacaaattcaaggcatctgcatccaacacgatctttcctcgccacacggataatagttgacgaattccttctgccgtgacaggtgaagtcccgattcccgaaccaatcccgaccgcttggaaacgggaaagattgtctacaccggaaaaacaaaattcattccgatccacttcaactaatgcctccggcacggagagatggatcatttctttcaacttacggggaacatgcacggaaagcagtcccgttccggaccgaatagcccccttggctgctaacacggctgcccccatcatggaataagagcctactattaataaggtattacccaaagtccccttgtgggaaaactttgccggaatcaataatcgggatgtaacgacttcttctgtcagataataataagtagcaggatactcccgcaagataatcgggtgtaaacgaatatccagcacttcccaatgtcccacgtaaactacattttccgggaacataaaggctaacttaggaaattgaaaagtgaacgtgtaatcagcctttatgatcgccccgttattttccccgttatcctctcccattaaaccggaaggcatatctattgccacaaccggatgggacaaaccatttatccgacgaattatatctcccaaaaatcccgttaccggacgatttaacccggccccgaaaatggcatccaccagcacgctattttcgtccggctgcaaattatccggatttttcacctcaatataacatcctcccatattaatgaaacgttccctgttcacggcacaattcggagagagatgatcgttttcatgcagaccgaaaaccttgacattcaatccgttttgatataacaatcttgccacgacatacccgtctcccccgttatttccggaaccggccagaatgttaaaaatatgactattggggaaaaaaatcaataatttttctgtaaaaacagtagccgccctctccatcaaatctaacgatgttaccggctcattctcaatcgtatatttatccaatttttgtaaatccgatgtcttgaaaattttattattcttcaacatgacgataggtttcaaacgttttcaatgactaaagataaaaaaataatttatatttgcacactattagcgtgaacgaaaaaatttaattatttaccaatacaaattaaaaacaaaagttatgttcaaaaatcatcctaaagggttgctcactgcggctctaagtaatatgggagaacgtttcggctattacatcatgaatgccgtgctagtgttattcctatgttctaaatttggtttgagcgaagccgccagtggtaccatttattcctttttttacgccggcatctacattttaagccttgtcggaggtcttattgctgaccgcacgcaaaactacaaaggaaccattaagacgggtcttgtcgttatggcaatagggtatattatcctatctgttccaatccttgcgacatcgcaaaatacaacttggttattaactcttacttgtgttgctttgttcttgattgcattcggtaacggtttattcaaaggtaacttgcaggcaattgtaggtcaaatgtatgataattttgaagccgaagctgcaaaacaagggccggaagctctcaaaatcgcaaaagacaagcgagattcaggtttccagattttctacgtatttatcaacgtgggtggtctaatcgctccgttcatcgctccggttttacgccaatggtggttaggtgcaaacgggttgtcttataacgcacaacttcctgctctttgtcacgagtacattaataatgcagccaacatggctcccgaggctcttgccaacttacaacaacttatgactgctgccggtggagctatcaccgatatgacagcttcttgtctccaatacctgcaaattttcaatgaaggtattcactactcattcattgcctctgttgcagccatgcttatttctcttgtaattttctttgtttcacaaaaaacattcccgaacccggcaaagaaagccgcagcacagagtgtaacttacacggcagaggaaaaagctgctatggctaaagagattaaacagagaatgtatgcattatttgctgttttgggtatcgttatcttcttctggttctcattccaccagaacggtatgtccctttcattctttgcacgtgacttcgtagactcttctgcagttgctcctgaagtatggcaagcaatcaacccgttctttgttattgtccttactccaatgattatggccattttcggattccttgcaagacgcggtaaagagatttcaaccccaagaaagattgccatcggtatgttcattgcaggtttggcattcttgttccttgccgttttctcaatcatgaaaggttatccttccgcagacgcgttcagaggtcttcctattgcagaacaaatggcagcaaaagctcattggtgggttcttatcgttacttacttcttcctgacagttgcagagttgttcatctctcctcttggattatcgtttgtatcaaaagttgctccaaagagtatgcttggcttgtgtcaaggtttgtggcttgctgctaccgctcttggtaaccttctactttggattggtcctctcatgtacaactcatggccgatctggcaatgctggtcagtattcttgatcgtatgccttgtatctatgggagttatgcttggtatggtgaaatggcttgaaagagtgacaaaataaccttatttatcaacatataaaaaaagggttcagaa

SEQ ID NO: 266 - DNA, 6193 bp, Butyricimonas faecihominis
gttaggaaggggtttaattaatattgtattgagagtgagattcattttcaattttcaattttcaactttcaattctattattatgaagaatattgtatttgttttcgtgatggttttaatgttaggttcttgtaaggatgccacgaagaacctgatgcctgccgtgacaggaaaaatcaatcaggtattgattattgccgagaagaacacgtgggatggtcccgtgggtgatacgatccgggaattctttggacaggaacaggatggtttgccacaggcagaaccgatttttgatgtgcttaacctgccggagaagtattttgataagaatatgaagggacaccgtaacgtgttgcaagtcgtgatttctccttctattgactctgcttacgtgcagtatgcagatagcccgtgggccaaaacacagaagtatataaagattgcagccccggataggaaaacgtttttcaagttgtttgatgagaataagttaagaattcttggtatttatgctaaggctgagcgtgatcggctaatatcggtttataagcggactgcggatacccggatctttaatttgttcaagaagaagtataatatattgttgtattgtcctacaggatattacgtgaataaggatacgactgatttcgtgtggatgtcgagtgaaacgactaagaatagtaaaggtattatattttttactgaaaagtacgagcatgagagccagtttaattatgccattatttttgatcgggtgaacgaggagttgaagaaacatattcccggtccgcgtgaaggatcgtatatggcattggatctggaggtaccttatacagccgtgcaatacaagtataacgggcattatgccgtgttattccgcggcttgtggatggtggtgaatgatttcatggcgggaccgtatgagttgaacgtggtgttggatgaggaacatcagcgagtgatctatatgatggggtacgtgtactatccgaacgaggagaaacgggatatgatgaaacaagtagatgctatcctgaacaccatggtgattgattataaagataaggaagagaagacgaagtaatcgatgagatatttaatattatttttggtgatagcatccgcgtgtacggatgctatttccgtgaatgtacaagacgggattgaacggtttgaggtttaccggaatctgttgactggaaaacgagttggaatcgtggcaaaccacacttcccgggtagacacggtgcatagtgtggacttcctgttggaaaaaggtattcacgtggtacgaattttttgtcccgaacatggatttcggggtacggctgatgccggggagaccgttggggattatattgatgccgggagtgatttgaaggtggtgtccctgtacgggaagaaaaagaaaccccagccggaggatctgtcgggaatagacgtgatgatttttgatatacaggacgtgggagtacgtttctatacttatctgtccacgttacattacgtgatggaggcctgtgcggaacagaacattcccttgatcgtgatggaccgtcctaacccgaatgctttttacgtggatggcccggtcctgcagaaagagtttaagtcttttgtcgggatgcacccggttccggtcgtgtacgggatgacgataggtgaatatgccggaatgattaacggggaaggttggttgaaagatagcgtgacctgtgatctgaccgtgatcccttgcgagggatggagtcgggaacaacccgtggcgttaccttatgccccgtctccgaatttgccggattctgtttccatcatgctttacccgtcaacttgtttttttgagggaacagcgatcaacgagggacgagggacgctacgtccgtttcaggtgttcgggcatccgagcttgaaaggtatgccctattcttacgtgcctcgcccgattaagggaatgagtatgcagcccaaatgcaaggggcaaacttgttacggcatggatttgcagggagaataccacactattttaaagatgaaacgtctgaatctggcttggttattgctggcttatcaagagtataaaggcacggaacccttctttaatgctttgttcaacaagttggtgggaaatgatagagtgcagcaacaactgaaggatggagtaacggaagaagagattcgtgccggctggcaggatgaggttgcggggtttatgaaggtgagagaaaagtatttgatttatgataaaaaaaatgttggttagcgggagggaatcacttaatctaaaatcataaattaagaaattaatcagataattaaatctaacatcgtgatgtggcgtttattaaagtatttctttatttcactattagtattggtgatattagtgtgtgcttcgataggcatcgtgttgaattttatttttactcctgaaaagttgactcctatcgtggagaaaagtgccaacgagtttttgaatgcggaagtacattttgatgcgatcgagttaacctttttctcgactttcccggaattcgggcttgagatgcgaaatggtagcgtggtgacgaaagtctttcaggattcgttgaaacaggagaatgtttatgccgctactgattcattgatgagtttcaagcgttgtcggctgatcgtgaacccgatggcttatctgtctcgaaaggaagttatcgtgaaagaattgcgtttggaagaaccgcagatttacgcttatattgacacgaacggggttcccggttggaatgtaatgcgggagtctgctgaacaggattcagtggtcatggtggagacggatacgattcaagaaaaattgattgaaagtattgatattcgtaacattcgtattgagggaggaaaactcgtgtttgatgatcgtgcgaatgaactttatgcccgattggaggggttcggtttgaaaatcgatggaaattttatggagcggaaggcggacttgctgttggatgtgaaagcaaagaatattcttttctggcaagaaggtaatttactcgtgaaacgcttgcgatttgctttgcaaacaggaatgcgtctggatcgagattcaatgctttacgtgttggataaagctgttatgagggtgaatagaatgaaattcggggtaggaggacgtttacaggcagatacattgaatcgtttgttggacgtggacctgacctttgggataaaagttccttctttgaaaaccctgcttgaccttgttccggaaacagtactaaaacatgatgaaaacgtgacggtatcgggagaggtgttatgccggggaacgttgaaggggaaatatggaaaggatcgagttcccgtgttggatgctcgtttcaaaataaatgaaggctccgtgaaatacgcggggatgccttattcgttggataaattggatgttgacttggaaggtgtcgttgatttacagaaagaacaaccttcgtttttgaaattaaaccggttttgcgtgaagggaacagatgtggatgtggatttaaatggccgggtggatcaattactttccaatcctttgattaccgcgagcgtgaaggcggatgtcgatttctctatattacccaaaatattcccgatacaagagggggtgacattgacgggaagtttgaatgctgggctaaaaggaaatgttttattggctgacataaagaataaaaactatggaaaactggatattcgaggggggtgtcaattaaagaatgttttgttagccagcgaaaaggatagtttgagattacgttcaaaatctgtgatattgggattcggaaccaacatggaagataagactatcttgcaggaaaagaacctattgaatggaatctttggttttgatagtgtcgatatacagtggaagaatgctttaacctttcacatggatacttcttacgtgaaggtaaaaacttctcccttgcgggataccacggcagtcgcctcaatgtcggcagacattcgtttcgggtggattgacttggtgatgggtgactccctgcggttccggatgggaaatagcacggctaattttgccttggctccctctccggaagataaaaagctcccgttagtaaaagcgaaggtcaatatggatagtttacgggtaagagctagagggaatcgtttacgactggcgaatgccggatttgatctttcgggagttccggaccggaaaaataaacgtcaatggctcgccagtggggtggtcggctttaaggatatgcgggtatacacccccttgtttcctctgcggatgcgtatgccggggacgaagattactttaagtcccggacatattaaattgaatggtgcaaagttgaagatgggacgttctgatcttttgttaaccggggaagtgtacaatctggcgggtgcatttttgcggcaggaggatttgaaagctaatttgaaggtgagatcgaatatgattaattgcaatcaattgatgaaagctatggaagttggggctgccaatcgaatgaacatgaagtgggggacagaagaggaattgagtgaggatgaattgtctgatgtggatttggcggcagattccacgtacgtggctgactctaccatgtctgtttttgttgttcctcccggtgttgatttcacgtttgagacgaatattaagaaggtgttgtatggaaagttggaattggatagtattcacgggaaagtggtgatgcaaaatcaatgtatcgagttgtcggatttgagtatgcgttccatggcggcagatgtgaagaccacgatgttgtacaaggcttccgggaaagagaaagcgtataccggtttcgatttacgaatggatgatattgacgtgggggcgttgattaattttatgccatctttggattcgatcgttccgatgctacgctctttcgatgggctggtagatttccatatggcggcggagacagatctggattctacaatgatggttgatttaccgaccttgagggctgtggcttacattgatggtaaggatttggtgttgatggacggggagacgttctcggagatttccaaaatgttgatgtttaaaaacaaggagcgtaatctgattgatagcgtggccgtggacttccgcatcaaggatggtatgattgaagtgttccccttcttggttgaggtggatcgttacaaggtggccgtgggtggagaacataagattgacatgacttttaattaccatatttccgtgttaaaatcacccgtacccttcaaattgggagtagatatttacgggtcgatggagaagatgaaattcaagattacgaaggctaaatacaagaacctatttatcccttccaaacgggcgaaggtggatagcgcccagattaatgtacgtaatcaaattcgacggatattgcagtcagcgagggaatgatgaaggaggcacgatgcccggaatattataattagcgattaggttacttgctttagattgagataataattatatttgtgaataacaagtttataatgttttatgaaatcgataagtgaatatttacaattgcttgcaggatatatgaaagctaatgctgccaattatcacatcacgcggatgggaatatttgggagtgttgctcgtggggaggaaacggaggttagcgatatagatatttgctttgagggggaagccccgactttatttactttggcacggatcaaatatgaattagaagagttgttggggcgacctgtggacttggttcgtgtgcgggatcgaatggatgaagttttgaaacaaaatattcagaaggaggccgtttatgtatgataaaaaggttttacatttacttgataaaatcattgaatctgttgaggttattctagaacgaacggagactgttgatagtgttaatgcttttttagattcttctacggggacgctcttgttggacggggtttgtatgaaattgattgccgttggggaaagtattaaaaatttagataagttgacaactggaggattactagttcattaccctcaaatttcgtggcgggaagtgatggggatgcgtgatattattgtacatcattattttgaagttgatgccgacgttatttttaatacagtaaaagaaaatataccagtattgctggaaatattgaaacagatacgaaaagaaatttgataataataaggagggaatcctggttc

SEQ ID NO: 267 - DNA, 6185 bp, Butyricimonas faecihominis
cagaaatgtctttcgttaggattttctttttatggagtatgttattgtcggttatttgtatcgatggatttgcccagtccacaaaacaagagtcggaagagcaggtgatgccccggttggtagggcgtcattatcaaagacaggaaaatatttcggggaaagaaatattggtagaggggtatgtacggcatttgtatgcggattctatcacgaaaactatttccgtgcaattagaccgtttttcaaggaaaggggttccacaaggttcgggaatactttttgtttgggacacggaaaaggaacgatccttgtggcattgtaaaattaatagtgatattgagaatctcagtcctgttcagaacgtgttatttttgacatccgacttcaagacccggtgctttgaccgacggagtggaaaggaacgttggaatgatagaggtagcattagttacgtggatcagaaatggggcgtggggataagatgtaaagataatttgggaggtacggaggtttcaaaactggaagggatcagcttgcataacgggaagaaaatatgggaaaggaagatcttttcccaacaaggatgggcggatatgttacccttgaatgattcggttattctcttgctttcagatgccttgtatgcgattaacatgaaaaacggggaaggatggaggcatgagatctttttaaaagaattacctttccctaaagctgaaaaggaatttatgcaagggtttacctcgaatattctcattgaaaaagagaaaatatatatagcatcatgtgatcgtttgttttgcttggatcacacgggaaaagtgctttggttacagggggtatcccgaaaaataaccggtgaatcccagatatttacaatggatagttcgctttacatggtaaactacggaagtggtctcgttaaaggctcgatgacgaaaaaatgggggattccttatgtcgctaagtttaataagaatacggggcttcaagaagcgttttcctcatttccaacaactttgggaattgtaaatcacgtacaagtgtccaaagatactttgtatgtattatttgatcaacatctgataaaattgtcctcgttggacttggcacggggaattcaagtagaattttctctggatagagatcgggcaggatattttgccagtaaccggatatttgttttggaagattctagatacaagacattgcaggagatggatagtactcaatgttatatccttaccgggaaacaaaatatcttgtgtgtcaaggcggatgtgcagggtgcaagaatgttattgccgagcgagtattgtctgtgttacctgacttatcaagggtattcttttctttcccgtggagaggaaactattgtaatcgctccttcgggagagttatgggctcatttgcgaatcagtaaaaatgccgtacgcgttgggaataaattgtatgatgcccaagaaaacaagataaccattgttgatttggacgaggtgattcattaatttttattcaagttatagtaaaaagcctgttttttgattattattcttacttttgccgaagtgtaaaaaagtacgatcaatatggatttgctcaaaaaaagaatcttacaggatggaaaatgctttgaaggtggcattttaaaagtggatagttttattaatcaccaaatggacccgattttaatgaagtcgatcggggtggaatttgtgcgtcgtttcgcgaataaggattttaataaagtgatgaccattgaggctagcggtattgctccggcaatcatggtggggtatcttttggaattgcccgtggtcttcgccaagaaaaagcaaccgaaaacgatggaaaatatgatttcaacgacggtacgatcttttacaaaagatcgggaatataatgtttgtatcagtaaagatttcttgagtaaagaggatcgtgtgctttttattgatgacttccttgcaaacgggaatgccgcgaatggtattattgatttgattgaccgggcgggggcgcaacttgtaggcatgggatttattattgaaaaggcttttcaacatgggggcgaagtactgagagaacgtgggattcatgttgaatctttagctattatagatagtttggataattgtcagataaaaataagataatccggcatgagtgaaacgaccaatcgtcaggttagttcggccattatttatggaatagaggaccgtccgccttttaaagaggctttttttgctgcgttacagcatttattagccatttttgttgccattataactccaccgttaattattgccggagcgttgaaccttgacttggaaacgacgggttttctcgtttcgatggctctttttgcctccggtgtctcgacttttattcaatgtagacgggttggacctatcggaaccgggttattatgtattcaaggaacaagtttttcgtttatcggcccgattatatctacgggattggcgggtggtttgcctctgatattcggggtgtgcatggcaggttcagtggttgagatgctgataagtaggattttgaaatatgccaagaaaatcattaccccgctggtatcgggaattgtggtaacattaatcgggatgagtctggtgaaagtaggtattacggcttgtggagggggtgttattgctaaagaaaacggtactttcggtagtttcgagaatctcggattggctttactggtgttagttttgatcatcttttttaaccggagtaataataaatatctacggatgagttccatcgtgatcgggttagtcgtgggatatgtggtcgcttatttcatgggtatgatagacttctcttctgtacagagttattccggggtaaatattcctgttccttttaaatacgggttggcttttagctggtcgtcatttattgccgtcgggttgatttacatgatcactgctatcgaggcttatggtgatattacggctaattccatgatttcgggggaacccgtggaaggagagaggtttattaaacgggcttccgggggaatccttgccgatggtttcaattctttcttggcaggggcatttaattctttcccgaattccgtgtttgcccagaataacgggatgatacaattaacgggagtggccagtcgttatgtgggatattatattgccgcttttttagtgatattgggactttttcctgctgtcgggctggtgttctcgttaatgccggaaccggttctggggggagcgacactacttatgttcggtacggtcgctgctgccggaatccgtattattgcctcccagaatataaacaggaaagccacgctggttatagcattgagtttctccttgggattaagtgtcgaattcattccggaaatattgaacagttgttccgataccattaaaaatatattctcatccgggatcacgacgggaggtttgacggcaattgtgtcgaatgtactgatacacgtgaaagaataatcgtgaaaacaacctttaagagttgattcttaaattagattatagcataaaatgataggaatagaagagatttaccctttggctgttgaattccggcgttattttcatcaacatccggaattcgccatgcaagaagtggagacacaacgctatattgcggaagtactggaacagaatggaatcccgtaccaaaaagtggggacgggattaattgcaaccgtggggaaaggagagaaatgtatcgcaatccgggctgatatggatgctctgaaagtcaaggaagagacaggattatcctattgctctcaaaatgaagacatgatgcatgcttgtgggcatgatatgcacatggctatggttttaggggctgcacttgttcttaaatccggagaagacaaattacagggaacaataaaaattgtttttcaacccagtgaagagaaacgtccgggaggggctcgtttattacttcccgaacttttaaaagaacccgttccgcaagctatattcggacaacacgttttcccgaaccttccgaccggaactatcggaattcgtcccggggcctttttcgcctcttcagataatattattttttccgtggaaggtaaaggtactcatgctgccatgccacacatgggttcggatcccatattggccacggcttgcttgatacaattttaccagacgttaattactaaatttcgagatccgttgatcccggcggttctttcgatcacgtctattcatggtggcacgtgtaataacgtaattccggatcgggtagacgtgttgggaacagttcggacacacgataactctttacgatataagatattcgagttaatcgaggaaaaatcaaacaccatttgtgatttatacgattgcacattccatttggataaaacttggaatggattgcccgtgttggtgaatgataagagtttgacagaatttgtgaagaaaaatgcaacagatttactgggagaacacaatgtgatcccaatggatcatcttaccttaggagaagattttgccatttacttggagaagattccgggagtattctgggtcttgggtgtttgtccgctggaacaggagagtatgcctccacttcacaatccgagaatggctcccgacgagaatgctatgaaagcgggtattgcgctaatggtggaaaattgtgtcaggatgttgggttaatgaaatactttaggacacatattaaaaatccccaagagttagagtcttggggatttttaatcgtatattccgatattactgtaaatctgcaatatttacttctattgcagccggataaattctttccgggtcgaaaaatgcagcacaactgttcaccatgtttttaagttgtggtttaacttttcccttgaaagcctcttttccatttactaccaatgtaatttccttgtctagatctaccagttgatcattcaagtaaatgattactttcccttttgttgcgggttgatagctcttttcaaaatccagttcgataccccagttcggatcaatttctgttgctttataagtaactaaatcaacctttaaggaaatattattctcttgtatatccatttcataatgggttctggatttcgtatcatcattagaacgttcttcaacaaataagttgtagaatccattacggtataaaccatccatttcaaagttctcccaacttacatgcttgggatagggattccgggtatattgtttcaaccaaggagttgtaagcttgtaatctataccgtgtcccataccgggaataagttctatacgatggatataatgacccgggttggctttttctaatttatcaaacgcatctttcgtgcgttgcgtaagcttattcctgtaaaatcccctgtcgtttgctcctgttaacagggagaaggcgatgtttctgcaattttcaacgggtgcattcttcagaggttcccctccagccatcgggcctgctgcagccagataatccgcataaaatgatgctaaccgttgactaccgtatccgccttctgatattccgaaaaagtaaactttattgggatttatttttccggatacgaaagctaaacgtaacatcttttcccaagcaaattgctttgccttttgccaccaacgatagtaatcgcccatgttggggatctgaggtatgaagtaaaccgatggagcatcatcgaacttttgacatatgttgattcccgttctccattcactggctttatctccagaaccatgcgtgtatagatataatgggaaacctccttccggttctgcatcccccttgtaaccccagtaatacggcatgattgcattgggttccagttcctgtgggagagtccattttcctgaatttgctttttccagtttatcaagattaatcagtttctgctcggagaatttgttatttgcctccttccatgcatcccacacgatttgctgcatctttttcacatcagttgatttgagtgtgcttttgtctttataggcatcagcattacctgacaggtgaccggagaaatgggtcgtgattttttcttttgtttttacatcctgttttttcaaggatacttcttgagctatgctataatttgaaaatgcaaggactattaacaagctcaacattttgaacgaataaatggtatctttcatttttgttatttatat

SEQ ID NO: 268 - DNA, 6178 bp, Butyricimonas faecihominis
actcatagtcaatggactacaggctgaggaaaacgaggaagagataacattgcctacacaaacagaacaactatccgaaccggacgagatggcccatcattatgacactctcttacgaggtcttcgtttaggctccgatgaaggaattgcaagctctcacggacgacgtttcggactcgataaaactcctaaaacaaacgtgtattcgcatcacaatatgcagagtgggaagaatattccgataaaattgtctttcgctaaaaaagaacggcactttatccaatacctgaccgcccgacatagtcaaggtttttatatctactcgctgaaagtattgctgttatgacaaaaccataacgataattataacaagtgagagcaaataaaaacataaaaaaaaatttagaaacaacatatgatcgattggcttcaatctattctcgattggtatatgcataacgtgaactactggagcgttctcgtgtgtatgaccattgagagttccatcattccctttccggcggaattgatcgtgcctcctgcagcttggaaagctgcaaacggggatctcaatttcctactggtagttattttcagcacaatcggatcggttctaggcgccctcttcaactacgtgttagcatacacgttagggcgtaaattcatttattctttcgcggaatcacgctggggaaagattttgcggatgtcaaaagaaaaagtagaaaaatccgaacaatattttttgaaatacggcaaaagttccacgctgatcggaagacttaccccgggggtaagaagttttatttcccttccggctggattggtcaaaatgcctttaaacagctttatattttacacggctgccggaagcggtatctggaacctgatactggctacggccggctattttttatattctcgaaaagagttactggaaaagtatttcaccgagatttccatcgtcatgctaatcgtcggcattggctttttcacgtatcttattattcggtcaacacgtaaaaaaaaacaattaaatcttaaattataacatggaatcacgtaaacactacacgggcctcacggataaacaagtgctggaaagtcgcgagaaacacggggctaacgtgttaactccccctaaaagggattctttatggcagatttttatcgggaactttgaagatcccgtcattcgcatattaatggtcgcggtatttctttcgggaggtatcgccatctccatgtatttctcggaaggaatcatcgagatcgcggaaaccatcggtatcgccgtggccattttactcgcgacaggggtagccacttggttcgtgtgggatgcaaacaaaaagttcgacgtgctgaatcaagtgaatgacgacacgttggttaaagttatccgcaacggtaatgtacatgaagtccctaaaaaagacattgtcgtggacgacatcgtgctattggagcaaggagaagagatccccgccgacggggtgcttctggaggcaatctcgttacaggtgaacgagtccagtttaaccggagaaccgatcgccaataaaaccgtgatcgagtccgaatttaacctcgaagccacctatccttccaatcacgtgatgagaggcacaaccgtatccgacggtcacgggatcatgcaggtactcgccgtgggagatgccacggaatttggaaaagtggcagaaaaatcttcagaaaaaagcgaagaaccaaccccgctcgacaaacagctggattcgctggcaaaattcattggaatagtaggattctgcggtgccgcggtcacgttcaccatcctattcattaaagccatcttctttaatcccgcatcccctaccccggaattaggacaactcggactgatcggggcattgataatcgcggcagtcatcatgcttgccaaagtatgggtacctgttatatacgatgttcatgccctacggggaaaagaaaaagaactccccaagagtataaagcaaggaggttggggacgttggattctgtacggattaggagcattggttatcatgctcgccattggtttggctttcggggttaaaccttgggatccgcaagcgtggatctcgctaagtctgggaaagaaaatcctgtcggcattcatggcttccgttaccctgatcgtggtaactgttccggaaggtcttccaatgagtgttaccttgagcttggctctcagtatgcgtaaaatgctaaaatccaacaacctcgttcgcaaaatgcacgcttgcgaaacgatgggtgccacaaccgttatttgtacggataaaacgggaaccctgacccaaaaccagatgaccgtgtacaaaacaaacttctacggtctgaaagatcaacaactcacggataatgaaaactcccgactgataaaagagggtattgccgtaaatacaaccgcgttccttgacttttccgatccgggcaaagtgaaaactctaggtaacccgaccgaggctgccttgttactctggttaaacggacaacaggctaattaccaagaactccgggaaaatgccacggtgatcgaccaattaaccttttccacggaacggaaatacatggccacattggttgactctcccgtcatgggaaaaaagattctatacgtgaaaggggctcccgaaattatcttcgctcaatgtaagaacgcgttgatcgacgaggaactgcaaccgattgccaattacaaaacgaccgtggagaaccaattgctagaataccaaaatcaagccatgcggacgctgggttttgcttaccaaatcatcgaggataatgaaccgcattttaaagacggacgtttatacaacaccgaattaaccttccttggtatcgtggcaatttcagacccgatccgtttggatgtaccggatgccgtgaaacgctgttttgatgccggaatacaagtgaaaatggtgaccggggatacaccgggtacggcaaaagagatcggaagacaaatcggcctgtggacggaaaaagataccgatcgaaatgtgatcacgggagttgaattcgcgaaactaactgataaagaggccttggatcgagtactggatttaaaaatcatgtcccgtgcccgcccgatggacaaacaacgcctcgttcaattgctacaacagaaacaagccatcgtggccgttaccggagacgggacgaacgacgctcccgccttgaatcatgcacatgtgggattatctatgggtagcggaacctccgtggcgaaagaggccagtgacatcaccttgctggacgactcgttctgcagcatcacctctgccgtgatgtggggacgttcggtgtaccagaacattcaacggtttatcctgttccagcttaccattaacgtggcagccttgattattgtgctactggggtctttgttcggttcggaacttcccatcacggtaacacagatgttgtgggtaaacctcatcatggacacgtttgctgccggggctttagcctcactcccacctagcccggaagtgatgaaacggaagccgagaaactcgaatgccttcatcatcgtcccgcaaatgcagagactgatactagccaccggaatcacgttcgtggtcatcctactcggcttgttatatgtactctccaactatgccggaggtattgaggccggaacaccggaaggacttcggaacctgacgatcttcttcacggtattcgtgatgttacagttttggaacatgttcaacgcgaagactttcggaacaaatgattccgcctttaaagatatattcaaaagcgaaggtttccttaccgtgggaatggccattatcgtgggacaggtactcgtggtcaacttcggtggttccgttttcagaaccatcccgttgacgtggaccgaatggatctggatcacgcttgccacgtctcttgtactttgggtgggagaaatcttcagagcattcaaacgaatgaaaaacaggaagtagtgtaaaaatcattggggatcatgaaaaggaatagcacaaactactggatatatctcggcatgatgaccgtcttctgtgctttaatttactttgcactttgcacgggtcaacatatcgatcatcccgaagttagcagtacggtaaacacggaaatgagttcatttgaactattcaaacgaatcatttccgacaatctggcaaactcactaacgatcttgttgttacaaatcatcgtgattttgatcaccgtccgcattttctcgttccttttcaaatacatcgggcagcccggtgttatgggtgaaatcgtggccggaatcgtcttgggaccttcgttgctgggatatttctttccggaattctctgccacgctattccctcccgaatcactgatgaacctgaacctgttaagccagatcgggttagtgctgtttatgtttgtcatcggactggaattggatttcagcgtcataaaagacaaactaaacgaaacactggtcatcagtcatgccggaatcgtggttccttttttcctaggagtagtagctgccatctgggtatacgcagactacggggcacagcaagcggaatttctaccttttgccatgttcatcgggataagcatgagtatcacggcctttcccgtgttggcccggatcgtgcaggaacgtaatatgacaaaaagtcccgtcgggatgttatccatagcctcggcagccaatgatgacgtcaccgcgtggtgcttgctggccatcgtgattgccttagctaaagcgggtagtttcgtcagcgccctctacaccattgccttaacgctcatctacatcgccttcatgtttatggtcatgcgcccgtttctgcgtaaaatcggggacatttatgccaactcggaagtcatcaacaagaccttcgtgggattcatattcctcttcctcgtactctcggcggtaacgacagaaatcatcggtattcatgcccttttcggggcatttatcgccggggtagtcatgcccacgaacatcgggttccgtaaagtcatgatggagaaggtggaagacatttctttggtattcttcctccccctattctttgccttttcgggattacacacggaaatcggtttgattaacacgccggagctatggggcgtgtgcttactgttcatcgtggtagccattgccgggaagtttggggggtgtacgttggctgcacgggctgtgggcgaaaactggaaagatagtcttatcgtcggcacactgatgaacacacggggacttatgcaactcgtggccctgaacatcgggttcgagatgggaatcctttctgcccaaatgttcgtggtgttattgatcatgtctttattgaccacgttcatggcaactcccatgttgtcgctcgtggaaaagatgtttgccaagcaagaggaaaaagcccatcaccacgagaaagtcttgctctcctttggtcgtcccgaaaccggtagaaccttactgggtatggccgatcttttactaggacatcgtctgcaaaacagtcaacttatagccacccacttcacgctgggaacagacttgaatcctgccaaagcggaagagtttgcagaagagagttttatcccccttcgggaagaggctcgccatctgaatttacaggttgatgaacgttatcaggtaaccgacaaactcattcaggagatgattcacgtagccaagaaagaacacgtggactacctgttcgtcggggccggacaacaattcatgcaggacaatagcacggcccccggaaaattgggtaaaagattcaccacgatctcccgctggctgaaacaattaaaagatcgcccgttacatttaccgggaacactactccggcaaaaactggaatctatcatggatcacgtggattgttccgtgggaatcttcgtgaacagaggtttcacgcgggcttccaatatcttacttctcgttgatagcgaagacgacttgttcctctttaattacgccagaacccggttgggcgaacaaagcatgaccatccggatttgctttatcaacgaacaggtggataaacaactagaatccagaattatgaatgatttcgttcaaatcgattcaaacaaattcatactggacaaaccattaaccatgaacacttttattgaaaataaagaaaccttattagtgatgagt

SEQ ID NO: 269 - DNA, 6160 bp, Butyricimonas faecihominis
ctatatagattgttatcattcaaagacactcaatctacagagcatgaattgtttaatattaccagtaagggaacaacattagactctgatggtaactttactacgattggaacaacttgttatgaattgaataaaaacaatgtgaaatttgaaatcttaactccaaagagcaatctgagtattgatgaaaatggtttagctacttgggaaaatgttccgggtgctgcgtttgttggagctacggttgatgtaaaagtaaccattactcacaattatggaacttcaactggaacaatttctcttaaaatcaacgaaaaagtaacaaaataataatgaatttcaatattcattattgattgcaaccagaagaatgggggtgtctgattccagacaccccttgttctaataaccaaacgatgtataataattaaatttgaatacatatgagaaaaacagtgttctctctttgttttctgatggtaacttccttttcggtagcgcagatccaaaagaaaaagattggtaatgatttttcccgttggagtttgggtgttaatgggggtatttcagcttttcggggagacatgatctctttttcggcggataaaacttatatcggggtacaaggaggcttgcaactggggtaccagtttaccccgactttcggtttgtccttgacggccgacatgggtcaaggaaagggaagtgccaagaaatgggagaaagcgtttaagatttacccgaacggggaatcttattatggcacggaaccagaagctggtttcgcttattacaacgatatttacgccaagatcaaatatttcacgttaggtctgcacggagattttaacgtgaataattttttcgggaagaaagaattgcgtcgttggaccgtgttgttaagcccggcggtttacttgcaaaagttctcgcccaagttatacaagaaggaagatgacaagcgttttgacacctcttccacgctggataatgacgtgaacttagggctgggaggagatatagccttgcgctatcgtgctagcaaatacattgatttacaactgacatccggggtggcctggatcgcgaataataactttgacggagtggccacttgttgcacgagcaagtataactggctggcgaacctctcggttggcgtggtgtggaaaattggtaacaacaagaagaaagagaacctgatgtacgccaccgctcgttccgtggccccggtgatacttcccgtgaaagaggaaactcggtcggtggtgaaagaagagcaaaagccagttgtcaagcaagaggagaaaacggtagagaacgtggtgaaggtggagaccacggagaaaacattcccggtattaccaacagtccatttcaaacgtaattcggcggtcattgacacggatcgttatgctagtgaactttctcgcatcgtggaggcgttgaaagagttcccgggagtgaaagttgatattcgtggttatacggatcacacagggacagatcgtatcaacttgccgctatccttgaaacgggcagaggccttgaagacttacctcgtgagtaaagggatcccggccgatcggatgagtacgttcggggagggtaaggatatgtccgtggatcaaaaagatatttacacggaaaaagcccgtaaggttgaagtgaaaaaacactaagactctctatataattacaggaaaagccactttgtattcaaggtggcttttattttacgatttcaatagcttgagaattttttccttgtctttttgtaactgagctcgtaattcttcaatatcgttgaatttacgttctccccgaatacggtcgataaaatttatcgtgatggttttcccgtacaagtcccggttgaaatcaaaaatatacacctcgcatgaaacttgcccatcattgctgaccgtgggacggatcccgatattgagcatcccgttgaagatttcttgctcgataataacttttacggcgtacacacctatggcgggtaacaatttccgctcgtcggaaacttgaatatttgctgttgggaaaccgattttgtgtcctagatgatgcccgtaaaccacttcgcccgtgacggaataagaataaccgaggaagcgatttaccgtggtaatgtctccaacggccagagcgttacggattttagtggaactgacatttacatcgtcctcttcaaaaacgacttctttttcaagaaaaaagccgtattcattcgctagttcctgtaagttctcgaaattcccggctcgatctttcccgaatcgatgatcatagcccacgacgagtcccttgattcttagtttgtcgataagaatctttttcacgaaatcattatagggttgctgggcgaattcaagcgtgaatttcaagataatcaagtgatcaacgccatatttttccaagatggcaatcttctcttccagcgtcgttaggatccctattttctgttcccggggataaagcacttctctcgggtggggttcaaagctgataatgacggattccccatcaatactggccgctttctcttttagatgttgtatcacgcaagcatgacctaaatgtacgccatcaaaacttccaatcgtgacgatcgggcatttgatctctatattttcaactccgtagtgaaccttcatttctagtcgtttgaatagttaagggcaaaaataatacaaataactgaattatggggctaaataaactctaatccctgtatatatatttatcgacgaatgatatagggttgatagtgagagagtatggtcaagagtcaggactgttccagtaaatacaattagttgacgaacttgtcggtcgggtggtctggaagattgagaacaacaagaagaaagagaacttgatgtatgccgccgctcgccctgttgtcccggtagtactcccggtgaaagaggagacacgcccggtggtgaaggaagagcggcaacccgttatcaaggaggagaaaaagccggtagagaacgtggtgaaggtagagaccacggaaaaggctcgtaaggctgaggtgaagaaacatgagtgagtaggagcgtggtttgaaatatagaaaagggattattccaaaacaatggataatccctttcccgattaaaatatattcgtacttcttggtgctgattttagaaccggtactgtatcatcgtattgatacgactggcgttaccgtaatctttgttgaagtcattccgacgaccgaatacgtactctatggcgcaggaaccgtattcactgaaatcccagaacaggttagcggcggcgtattgtgcgtatttgtatgatgttgcgggcatcccgtaacgatcaaggactcgggcatagctgtacatgatatttgatgtcagaactttactccaattatgggaaaatccgatatagccaccccatgcattgaatgctttcaatttcccttctgccgtggcgctgggtacgaggtcaaggcccgaaccggaaatgtcctgtatgtagttggagattcctttcccgtacactccctgaaaacaaagggatgtattttcggcaaattgccagataccgctcaatgaggctccccaaccggtaacgatccggtctttatcctcaacttcatctttgtaatacatatttctcaacacggctcccgcttgcaggtggctcccgtttttgaaactgtatttcacgttaatcgggaagtccggaattcgttggttgatatacttggtaaattctccttcggtgtaggatggctccacgtactccaatgccaaggatgcttccagcttgtctgtaaaattatacgtgtagcgaatctgtggctggcgtaatgccacttcactggaagggccttcctcgtccaccgtggccggtcctgcggcaatatcacagaatgtactccatgttttaccgatcgtgaatcctttaaacttgataaaagcttgtcttagaatcggggtactctggttcccctcgaattccatttccatgtaggtgaccaatctgccgacatccgtgtccccgactaatttgaagaataggcgggattgcccgacagaaataccatatctacccccggattgttctcctttgagagcgatggtgtttgtggtaaaataattgtcattgggaactccgttaaaatcgtaaatcccctgtacttgcacaaatccccccacaccgaaaacgaagtttttattcttgttgaaaaacacgaatcttggagatgccgggtcattgaatgatagcgggaaagcctctttcatcattttatagaagttgtccgcgtcatttttttccgaaacggaagtcacgttgacttgcgctcgtacccccgtgtagaatccacaagagatggctatcaacaatagcaatgtcaattttttcatagcgttacaaattaattggttaatttagtaacactatatacggggatggaaaagtaaaagttaagaagatagtgaattttatgattttagattgagggatttccgattccgcaatttaaaagaatcataaattgcggaatcggacccaatcactcaatcattatatcttaacttctttcagaatttcacggaggtccgtcttttttctcaagatgtcatgtaattggtctatggccacgcgttcctgttccatagtatcccggtaacggatggttacggcgttatcttccaacgtctggtggtcgatggtaatacagaacggggttccgatggcatcttggcggcgatagcgtttaccgatagagtctttttcatcgtactggcatctgaagtccagtctcaataatttcatgatctcttccgctttctcgggtagcccgtctttcttcacgagtggcatcacggccagcttgattggggctagggcaggaggtaatttcaatacaacccgtgaatccttcgatccgtcttctttttcgatctcttcttccgtgtaagcggcagaaaggatttgcaggaacatccggtccacgccgatagatgtttcgatcacgtaaggtacgtatgattcgtttaactcgggatcgaagtattgtattttcttcccggagaactcttggtgacgtttcaggtcaaagtccgtgcgggaatggattccttccacctctttaaagccgaatgggaaacggaattcaatgtccgtggctgcatttgcgtaatgcgccagtttctcgtgatcgtggaaccggtatttctccggtccgaatcccaacgcttgatgccagctcatacgggtttccttccatttcttgaaccaatcgagttcactaccggggcgtacgaaaaattgcatttccatttgttcgaattcacgcatccggaagatgaattgacgtgccacgatctcgttacggaaagctttaccgatctgggcgatcccgaaaggaactttcatacgtccggacttttggacgtttaggaagtttacgaaaataccttgtgccgtttcgggacgcaggtatatcttactggcaccttcggccgtggatcccatttccgtggagaacatcaagttaaattggcgtacttccgtccagttgctggttccggaaatcgggcaaacaatcttgttgtcaacgataatctgacgaagttcaaccaagtcgttatcattcaaagcctttgccattctggcagtaagttcttcctttttccgaatattttccagcacttgcgggttcgtctggcgatataatgtttcgtcaaacttctccccgaatctcttttttgccttggcaacgtctttttcgatcttgtcgtcatatttggcaatatgatcttcgatcagtacgtctgcccggtatctcttttttgaatctttattatcaatcaacgggtcgttgaaagcatccacgtgtccggaggctttccagatagtcgggtgcatgaaaatggcggaatccaatcctaccacgttttcgtgtaacagtaccattgagtcccaccagtactttttgatattgtttttcagttcaaccccgtattgtccgtaatcgtacaccgcagccagcccgtcatatatctctgatgactggaacacgtatccgtattctttacagtgtgctaccagctttttaaaaatatcttcttgtgccatgttatatgttataagttaaaaactaaaagttaaaagc

SEQ ID NO: 270 - DNA, 6157 bp, Butyricimonas faecihominis
ctatatggaagacttaatttatcgagttctagtgggagaggcgagcgtggaggaacgggaggagttcgagacgtggttgcgggaaaatgctgaacaccgtgtcttctttgaaaaaatagagcgggcctggtacacgggaaagtatgtggcccggtggaagaacgtggagatgagtgccgcatggaaagcagtggaacacaggagggaacagaggcaaaggcgtcatttcagacgaatcgggtggagtgtggctgcgagtgtggctgtgctgattgggattacatggcttgtgggatcgtgggaagaagaaattccctcttcggttgtggctcagtccccggtggtaaaaccgggtgaggcgaaagctcgcttggtgttgtcatctggatttgaggttgagttgggatgcacgaatggagatacgatccgtgaaaagggtttcccaattctgaacgggaaagagtatattgattatagtaaacaggaaaattccttacagggagatgttgtgtataacgagttgatcgttccgtcggggggagagtatcggctagtgctggccgatcgcacggtggtttatatgaattccgaatcccggttaaagtacccggtgatgtttagcgggaaagatcgcatggtggagttggaaggggaggcgtattttgacgtctccaaagatgaggtgcatccttttatcgtgcgtacggaacgattggacgtgatggtgttaggcacaggatttaacgtgatggcctataaacaagatccccgaacggaggtcaccttggtgaaggggaaggtggatgtaaaaagcgggaaaatcaacgaaatattgactcctagccgacaattcgtgatgaataacgagaaccgtgaatacgaggtaaagaccgtaaacgtggctacttacgtggactggaaggacggggtacttaattttgacggaatgccgttggaagagttgggggataaactgggacgttggtatgaagtgaagttctttttcacgaaagagagcttgaaacggttaaagttttcgggggcgtttaagaaatataacgagattggttacatactttctttaatcgaggcaacgactgatgttacctttaaaatcaataaagatgtgattgttgttaatgaaaaatagagaataggattacttctgaggaataaaaataccggaaagtgttaggaccacgatccggtaatcactcccgaagaagtatttaagtatcacttaatttacaaatgtatgaaaaaaagtaatgtcttgtggcttgttttgtcaaaaaataagcagcaacaattgtcgaaaattatgaaattgacttggattttgtgcgtctgtttcgtgtgttctctgtctgcaaatgtgatgtcgcagcagagagtgaacatgaatctagggaagacgtcaattaaaacggtttttgaggaaattcgacggcaaacgggaaagatcattatctataatgatgatcgtttagccttggagcgggtggtaaaggccgattttaaagaggcagatgtacgggctgtgcttgataaggtgttggctggtagcgggatgacttatcgtttcgtggatgattatatcgttatagttcccgaggtgaagacgatgcgggatagtacggtgaaacaattccagataaagggaaaagtgacggataaaaaaggtgaggcgattcccggtgtaacggtacgcttggatagtactagtttaggtgccgcaacagacgtgaatggagagttttcactgacgttatccatggaaaaggggacacttgttttttcctttatcggaatgaaaacgcagaaggtgaagtacacgggccaaaaatatcttaacgtggtgatggaggaagatgccttggaagtggaagaggttgttgtcaatggttatttttctaagagcaaggaaagtttcacgggtaacgtggtttccgtgaataaagaggagttggccaaggtgtcgtccaataatttgattagtgctttgcaggtgtttgatccttctttccggctgcgtgagaatgttgacatgggatcgaacccgaatagtttacctgattttcgtattcgcggtaattccggtttcggggtggaaggcgtgtctgaggccacatttaggaatgatccgaatttacccacttttatcttggatggttatgaggtcgatgtagaaaaaatctttgacttgaatattgaccggatcgagaacgtgacaatattaaaggatgcttcggctaccgcgatctatggttcccgggcagcaaacggggtcgtggtggtgacgacgaaagctccagaagaaggaaagttgagagtgtcctataatatgaatatggcgatcaatgctccggatttgtctgattataacttgatgaatgccaaggaaaaattgcaggccgagttggatgccgggttatatgattcggatgatctttatacccagcagttgttacgaatggattatgcagagcgtttggaacgagtgaaaaaaggggtaaacacgtattggttgtctcaacctttgcacgttgctgtcggacataaacattccttgtatgtagaggggggtgaccaaagcgtgcgttacgggattgacgtgaattaccaggctaatccgggagtgatgaaaaaatcttcgagagaccggttcgggataggctttctactttcttataatttgaataataagttgttgtttagaaacaagttgacggtggataaggtgaaagcgaaagaatcaccgtatggttccttcaaggattatgccaaggcgaacccgtatgaccagatttatgatgaggatggaaatttgattaaatcataccaaccgcacgtgagtacgagcaatcgtttcttgaatccattgtacgagtcaacgttgaatcataaagataacacgacgtacacggagtggacggataattttgattttgactggtttatcagcgagcatttcaggttgaaggccagagtgtcatactcggaacgtacggataagcaagagaaattcacggacccggaatcagcgatttacaatgagtctgactatcaggatggagaaggaattttgaagagaggggaggcgtatagtttccacgagaagagttctaacttggatatgaacgtggtgttcagttataaccagcagttggggagtcactttttgaatgccgtgttgggaggtaatgttatcgagacccggtttgagaatgaatcatatagcgtgatcggttttccgtcgggtagtatggattacatttcttttggtaaggagtttaaggatttaaccccggaaggaagtgagggattatcccgtttggtaggtttgtttgtgaacttgaactatacttggaataatatttatttactggatttatccggtcgtctagatggatcgtcaaaattcggttccaagaagagatatgccccgttttggtcggcaggtattggttggaacgtgcataatgaaaaattttttgaaggattgaaaggtgtgattaatcatttgaaattttccgcgaatgtcggggctaccggtaaagcttctttcgaggcatatgaggcccaggatgtgtacgagtattacaagggacaatggtatgccggggggttgggtgtgatcatgaacaacatgggaaatacaaacctgcaatgggaaaagacacacacgtttgacgggaattttgaaattcagtttttgaatggattggtcagtgctaatatgaactactacgtgaagacaacgaaagatttgcttgcagatattactttaccgccttcttcaggttttgaaagttacagggataacttgggagagctggagaataaaggatatgaaatttcgttgagaggattcgtggtacgggataaggatttaatcgtgaatgttttcggatcgatcgcgcataataagaacgtgattaaaaagatttccaattcattggaaacgtacaacaagaaagtggatgatgagcaggataattatgaaccgggatggggtgaagcgatagagacagccaaacctcaggtacaatttaaagagggacagtcaactacggcgatttacgcggtaaaatcccacggaataaacccgatgaacgggaaagaggtgtttgaggatttgaaaggtaacttgacttatgaatggagtgctgccaacaagatagtgtgcggggacacggaacccaaggtatcgggagcttttggtgccaatgcggactggaaaggatttaatattaatgttagtttcttgtatcaatgtggaggacaggtgtataaccaaacgcttgtagatcgggtggaggatgcaaatttgagttggaacgtggatcgccgggtgttgcaaggcaggtggaaagaaccgggagatcacactttctttaaagatattaagaaccgggatcggacggaggtttcttctcgttttgttcaggatgagaacgtgttgcaattcaaatcattgtcattttcttattctttcccgaccgagttgattcaaagatggagcttggaacgtttaaaattgacgttccagatggaagatattttcagaatatctaacgtgaaacgggaacgaggtctggattacccgtttgctagaatttttaacgtgggattacaggtacaattctaatcctgtagaaatgtaaaataatggatgatatgaaaaagagaatattgattatttttacgttattcgtgtttgctgtgacgaacagcagttgtgatagttggttggatgtgaccccgcaagcacaggtgaatgcagagaaattgttttctaaacccaaggggtttgagaatgccttatatggtatatatacttcgatgacggatgcatcttcgtatggaacgcacatgacattcgggttgatggatgcgttggcccagtattatgatgtttaccaggacaagtatcatcttctttacgaggcgtcccggtataattataaaaattcgaattctcaagatgtgattaagaatttgtggttaaaaaattacaatagtattgcgaattgtaatgttttattggattacttgagcgagaagtccccctcgttttttgaaggtgaagagtataagtttttggttgcggaaacgaaagcattaagggcttacttgcatttcgacttgttgagagcatttgccccgtcatggaaggagaattcggaggctttgtgtttgccttatgccgataacttcacggaccgggtgcatggtcaaaaaaagacgagcgagattgttcaattgattctgacggaccttgatagcgcccggatgatgttaagtacggttgatccggctcgggaagagagttttaaggagatgtataaccattacgtgacggaaatcgggaatgattttacaacggcccgggcatatcgcatgaattattgggcaattaccgggttgatggcccgtgtgtatcattacatgggggatgagagagcttacacgtatgcccaagaagttattcaggccgggaaagacgggttcttccctttcaccgaggaaagtgcggtgagtgcccctttgaagagtcgggatgtcgtgatgcaaaacgagattctgtttgctttgaattatgctggtattcatgatttgtggtactcttatgacgcctctcaagataattattacacgataaatgatgttacttccatttatccttcttctgatgatttccggaaggaatatttggtaatcacgaatagtaacgggtatgatatatcggttaaatatgcggatgtggattctgaaaatggcgggaaagttccgatgatccgtttgtctgaaatgtatctgattgctgcggagagcggttttaatgcccataaggaggttgctatcggtttactcgaagaattgcgtaaaaatagggggatagccggggagatttcaacgacgattacttatgataatttcgtgaaggagttgacgaaagaggctcgtcgggaatttatcggggaaggtcagttgttttactggtataaacgtttgggattaccggttgatcaggggagtaccacgataacgcttgaaccgtctcaattctgtttgccattgccggccactgaagtagagtttggcgggcgtaaggaagattatttaaataataagtagtagattaatatttggc

SEQ ID NO: 271 - DNA, 6131 bp, Butyricimonas faecihominis
aatttgtacacgaattacagattaagataccaaaattactgatataagcaagaaaatacatagatctaccgatattgtttcggtgaagacagggcataaagacgtatcaacttcgtatcaaagacgtatcaaagacgttcgtgaacgtctttgatacgtctttgatctgaaattgcaatttatttgcccccgatataccctagcgattcaacctttctacttcctgttatccaatattttcgtcccgatatccatgtaacgatacacatcccgggtggtctcccggatacgttcctcgtcctttttatgccccaaccggacaattatggcattcttttcgggaatagcaataatatactgtcccaacattccccggaaatagggattctgttgccctttatagttcataatccaaatctggaaaccataataatccaaagaatccttcccccactcgtccttcagataccccgccggactcatggcctcgttgatatattcttccgaaaccaactgtttcccgttccagttcccgtgatgcaacatcaaacgggcaaaacgagcaatttcccttgccgtggtgtgaaaacagcagaaagatttctcgtccccgtcctttttatccaacaaccaataagcatcttgacagacttgcatcggtttccataacttctcttcggcataatcactaatgctctttccggtcgctttctccacgacaaaagccaatatctgtgtatccccgctccggtatgaaaattgtttccccggttcctcgatcacgtccaacgtagtcactaaatcataaagatcgttcccgtagtagccatgtgtagttaccgaaaacagcgacgcgtaagcctcatcccaattcaacccgccactcatggttaacaaattgcgaatcgtgatatttttcttttttccctcgttaaattccgggatatatttccccaccggatcgtccagactggcaattttcccctcgtcataagcaatgccgaccaacagccccacgatactctttgtcgatgaaaatatattcgatgtcttcgtgtcattccaaccggaacgatactcctcgtacacgatactatcattctggatcaccagaaaagaaaccgtacgaaaatcattcaagtaagcatcatcctccggactcaactcgtatgtgttataatccttggcaatcccccacgtccagcacgtgtcggccttccgcaccgtatgcttgtcaaacatcgacaaatcatctatcgacgggtaccagtaaagcaaagcctgccgtgcataataaggcagacagaaataagcaatccccagcaccaccacaaccgtcaaaagtatcttatatcttttcttcattttcaattctccatttccaattttcaattttcctgactttcgccaccatcttccggatcaccccttccccgatacaaggagcatgagcatcttccgggaaaaagatcacgaactctccgggagataacgtgaacacccgctccaccggatcccggtaaaaagtaaaatcacctgcgccatcatacggcgcccgttcctcgcccaacagccttttagccttccagccatatccttcaggtgtactcaaaggcatttgaatatcaatatatttatcatgccgttcgtaaacagcctcctcaatttttcgtcctttggcatcttcaattttcagataggcattatctccgtcaatgtcaattcgccccacgggcatacttgccaaatcatgcgtttttatatagtcaaagacaactttaaaatacgggttcaacccctcaattcgttcgctattagccagtacgtctacaatcataattttatttcaatttttttatacaacaaagataacgaaaatacgttaacaacaagaaaaccaagcaagaacaacgcacattttcttctaaaaaatgtgttcattgcccggtttccatcatattctaggccaaacgttatatttagaactacataaattttagtcactatgaaaaactcataccttacgatgatcgttttcacgatttttaccatcagtttttgctcccaaacgcaggcacaaaaacagagccgcgtggaaagactataccaacacatcgcttggtccgaaggagacaagtacgatcggttgagagaaagaatggacaccaaaagtatggatgcctacaaaaatgaaatcaccttagccgatgccctcagacaattgttactgacacccggcatcaatgccatcgaaccctacctgaaaagcgacatgaccatccagcaacaagatggcggcgcccggttacgttcgttctgccaagcagcaaacctcaacgtcaacctttttcgtcacaaagcagactccacgatctttgctttgcttgtttattccaaggatcaacttgaagattcccgtacagtacttgcacaaataaaaaaatacgattacaacattgaccccgatatttacgaggcgatcgtccggctaaaggaaaaagtgcaatatgcagacctgaaagcccagccgacacaggcaaaatgtgacacttatttcaaagactttcacaaccaatacaactatgtcgaggtggccaaaatatacaatgatctgttatacaaagccgcccttgacaagcaaaacgattcaaccattctctgttattttaatgacaccacgctaaaaacattctacgccaacaccaaggaaccgcgtccctacttgactgaagtacaaaaactctatgacgactgcctgttcaaagcgatacaaacggccacttccccggaagcacaaaaacattgtatcaatgcttatatcgaatgtccctatctagccggatgtaaccgcagatacctgccacaagtggaatacgctaacgacagcatagacctgatcattctcgtttcacaggtggattctttcccacgccttccgctaatcaaggcttaccttcaaacacataaatacaagcaattccgggacaaagcccaacagttaagggaacaatttatcgactcgatgatttatatatctcccacgatcactcgttgttactctggaacaaacatcgtccgggaaactagaactcacaatgactcactcacaatcaccacataccaatactcccctcaaggacttttaacacggatcattcaaagcacacgactgcaaaaagattccactaccaccaccccgttgaacttgattgtcacaacattcaggtacaacaacctcggtaaatgctacgaagaggaaaccattgattcccttaccaaagcaaccgtatgcctaatcaattatcagtatgacacgacctctcatcccgtcatgaaaacgaccaagtggaaccacgggcaaaacactattgactattacaatcaccgaggacaggtcaaccggacacaagaataccggaacgggctgatttgcgctcaaacagactacacttacgacactcaaggccgtctctccggtaaaatatggataaacaccagaccggataccgaccatcccgccacaaaacaagtcaccctttacacgtatgatccattcggctaccttgtaagcatttcctacgtgaaggaaaacctgcaaaatgaaaaaataacaagtaacatgacactaacttacgacgaattcggcaacccgatcaatcctaattaccaatatacttacgaccagaccggaacatggaccagtaaaacgagcaagacgaacccggcggacagcgagaaaatcgcttatgtctacaagcaaaacaaaaaatagacccgcacattttcgtttaggctttcaattttcaattagttatcgtacctttgtgtccaattaatttttaaataaatggagcacagagcaggttttgtcaatatcttaggaaaccccaacgtggggaaatcaaccttgatgaatcgactagtcggggagaaattatcgattatcacgtccaaatcccaaaccacgcgtcaccggatcaaggggatcgtgaacggagaggacttccagatcgtgttttccgataccccgggggtcgtgaaacccagttacaagatgcaggaatatatgcttgatttctcgaaaagcgccattatcgatgccgacatcatcctctatgtcaccgacgtggtggagaatatcgaaaagaacgcggactttatcgagaaagtgaaacaaagcgaagttcccatccttctggtgttgaacaaaattgacctgaccaccccggataaactggatgccctgttcgacaagtggaaagaaatcatcccgcgagctgaaatattcccgatctcggctaccgagaatttcaacgtggacaatttatacaagcgaatcttggaattgttacccgtgggagaaccctatttcgacaaagaagagatgaccgatatgccggcacgctttttcgtaaccgaaattatccgggaaaagattttgttgaactacgataaagaaattccttattctgtcgaggttgtcgtggaagaattcaaggaagaaaccaaacgtatcaacatcatggccgtgatcaacgtggaacgggattcccaaaaaggcatcattatcgggcatcagggagccgcgctgaaaaaagtcggtacggaagcccgtgttgacatcgaagccttcttcgggaaaaaagtattcctgaacctgtacgtcaaagtcctcaaagactggcggaacaaggaaaacgacctgaaacgcttcggttacaaacaactttaattttttagtttttatcttttaacttttatctttccaatgagtaatattgttgcaatagtaggacgtcccaacgtgggaaaatcaacacttttcaatcgtttagtcggtggtcggaaagccatcgtgaacgaggaaagcggggtgacccgtgaccggaattacggaaaatcagagtggaacggcaaagaattctcggtgattgacaccggaggatacgtttccaacagttcggacatcttcgaggaggagatcaacaaacaggtattactcgccatggacgaggccgacgtgatcctgttcgtctgcgacgtggaactcgggattaccgatctggaccacagtttcgcccgtatgcttcggaaagtcaacaagcccatctatctcgtggcaaacaaagttgataacggagaacgtctctacgatgtccacgaattctataaactgggagtcggagaagagattttccccatagcatccatcaacggttcgggaacaggagaactacttgacaagctggtttcacacttcaccaccgacccgctcgaagacatggaagaacttcccaagatcgctatcgtgggacgccctaacgtgggaaaatcctccacgatcaacgcccttatcggggaagaacgtaatatcgtaaccgatattgccggaacaactcgcgatacgattacaacccgctacaatcgtttcgggcacgactttttgctggtggacaccgcaggattacgtaagaaagcgaaagtcaatgaagacgtggaattctattccgtgatgcgttccgtgcgtgcaatcgaagacagtgacgtgtgtatgctgctgattgatgcaacccggggaatggaatctcaggacttgaacatattccacctcatcgagcgtaaccaaaaaggcgtggtagtcctcgtgaacaagtgggacctaatcgagaaagataacaaaacgacgatcaatttcgaaaaagaactgcgggcaaaaatggctcccttcaacgacgtggagatcattttcacctcggctctcacgaagcaacgtctgttgaaagcgcttgaatcggccatccagacctacgaaagccggaaacaaaaactgaaaacatccgaactgaaccgcgtcatgctggaagagatcgaaaacttccctccccccagcttgaaaggaaaatatatccgcataaaatacgtgacacaattaccgtcgaaaaccccaactttcgcattctattgcaacttaccgcaatacgtgaaagacccctacaagcgtttcttggaaaataaaatccgggaacactggaagttcacgggtgtaccgattcagattttcatgcgtaaaaaataaaaaatgaaaaccatcctcgctgcaggatggtttttattttatcattatatttgct

SEQ ID NO: 272 - DNA, 6121 bp, Butyricimonas faecihominis
gttatttgtatctttgtatttgtaaataaggacttaaaaatcattgaaatgaaaacaccaaaagtagaaacgaaaagttttttccaaaaattgttggaggataagcgtgctattcgggagtgtattcagaagaatggtgatttgaaaaaattagctaaagagcgtgatatcaaatttgcaactcccgtatcatatcgttcagacagatgatctggcatataaatttataacgcaaagcggtgttgtttacgccgcttattttattgatattagtgaagctttcggggcagatcatgtttatactttttcttttgatgcagtggggaaacctgtgaatgatgggagggtgcgttacacgattgtcaagattttgagtgatttttttcaagtaaatcaaaattcgcttattgttgtttgtgagacttgtgataagaaggagaatgctcgttttcgattatttgaaaagtggtattgccaaacaggtgagcatgacattgagaaaattgatgcatttgtggatcatgcagactataattttcgctcctctcttttgcttttcaaagaacatcctcgttaccaagagatcaagggtatatatgacgagtgggtaaaaagtgagatggagaaatgaagataatcgctttgaaaaaagtgttgtgattctgataatttgttcgtacatttgcgctgcattaaaagtacggggatagttttaaacgtgtaatgggaatgcagacgtggcttataaccccggggcatcagtctggatttgagtagcacaagcaatgttattattatgcaagtatttgatttaaaaggagaagtaagaaacgatttaggtaaaaaagctaccaaggctgtaagatatgcggagaaagttccatgcgttctttatggtggagaggcaaacgttcatttcgcagttttggataaagatttgaagaaacttctttacactcctaatgtatatctggtaaatttggatcttgatggtaaatcttacggtgccgtgatgagagatattcaattccacccggtgacggataaggttttacatattgatttctaccagacctcagaggataagccagttgtaatggacgttcctgttcgggtaacgggacacgctgccggagttcaagccggaggtaagttggctatcatcactcgtaagttgaaagtaaaagctcttccgaaagatatgccggatgaagtggttgttgatgttacttctttgggtgtcggtaaggctatcaaagtacaggatattcacgtggaaggcgtagagttaatgaatgccaagagcgttgtggttgctcaggttaaattgacaagagctgcaagagctgcacaaagcgctcaatagtagtttgaaaaaatagacagatgaaatatcttattgtgggattgggcaacataggtcccgagtaccagaatacacgacataacatcggatttaaagtattggacgcctttgctaaggcgtccaatgctgtttttgaagatatgcgttatggtgcggttgccacggtgaagttgaagggacgtaccctgattttgttgaaaccgaacacgtacatgaacctgagtggtaaggcggtcagttactggatgcaaaaagagaaaatcgagttgtcgaaccttttcgtggtggtggatgacttggcgttacctttcgggacgatccgtttgagaggcaagggaagtgacggggggcataacggtttgaagagtattaaccagttgctgggtacgcaggattacgcccgtttgcgttttggtatcgggaacgagttccccaagggaaaacaggtggattacgtgttgggagagtggtcttcggaggaagaggaacgttttccggccatgttgaagcattgcggggaggtgatcgagaattttatttttatcggggtagataagacgatgagcctgtgtaataatttgcgattttagatttacgatttgtgattttgaagtcgtgactccgaattttaaaatgaagatttcaggttcgtgatttcaggttggcatttgttttgtcatttgcagaataagttttagctttgacagattgtaagttataaatgaataagccgtggagaaggttagaatagataaatggttatgggcggttcgaatttttaaaacccgctcgttagctgcagaggaatgtggtaaaggtcacgtctctatcggtgatgcgcacgtgaaagcgtcccgggaggtaaaggtcggggatgtcgtgaaagtacgggtcccgccgattgaacgggagtacgtggtgaaacaaatcaccgataaacgaatgtctgcccagttggccgtcgatttcgtggaagagatcaccccgcaggagaaactggatattctccggggaactttcatgcaattcgagagccgggatcgtggttcgggacgtcccacgaaacgggatcggaggttgattgataaactcaaagaactataaaattttagatttaatgattttagattttagattccagccgcacaaggcccacgtttttaatcgtaaatcatgaatcgtaaatcataaattagtatgttgatagcacgcgagaagagaaagagtaatgtggccgaatatatcctgtatatgtggcaggtggaggatatgttgagggcgatgcagatggatattgagctggtgaaccggaacgtggtgagccagttcgggggggatgacgcgacacggaaggagatcagcgattggtatgacaacttgatcgagatgatgaggaaagaggaggtgacgaagagcgggcatgtgcaggtggtgaagaacatggtgaacgagttgacggagttgcatttccatttactccataacgtgcaggatatgaagtacaagcagttgttcatgatggccgcgaataatttgctggattatcgccggaagacgaacttgccggaggaggtttccgatgtcgagctggcacttcatgctctttatggtcatttgatgttgcgattacagaaaaaagagataaattcgcaaacgacaatggcaatggagacgtttagccggatgctggcttacctagctctgcggtacaaagaggtggaggagaacgaggagatgatgtgatttgttgtcgagtaattcatgattaaatcaatcgatatgaagagattattattattggcaattgttttgttcggagcggtaaacgcttgggctgaggagggatcaaaggagtttaagaagagctttcccgcggcatccattaatgagttgacggttacgaaccgctatgggaatatcgatgttaagcaggaaggtgacgagttttccatcacgacttccgtgtgggtggaggcaaaaacaaaagccaaggttgacgagatattagagtatatttccataacggccaaggagcagggggctgtgttgaacgtggagacgttgttccagaaggatatgagcctgcggcagatgttcgcgggggtgacggtgagcgttgactatcatatcaaggtcccgaaaggtaagaaagtacgtctggtatgcacggagggaggagcctcggtggccgatttcgtgggggatatgaacgtggagatcgtgtccggtaattttaaggccaattccgtgacgggcggagagttttccgtgaaacagaataagggggaatttgaggtggagaagttgggaaacatgacggccgagttcaaatcctgtaaggtgaagattggggaagggaaggagatgaaactggattgcacgtcaacgactttgcagttgatggaggcggataaactctcgttgaaaacatcgggaggaacctgttatctggggatggtcgaggatatggacgggacttctttttacacgaaatacgaggtgcaggatattggcggatcactcaagatggatatgcgttggggagagttgaacgtgcgtaatatcaatttctcgttcgctactgttgatgtgaaaggttcttccacgaaggtgggattgactttcatggaaggatgcggttacacgctggagttggcacgtaataaaaatttgaaggtggaattgcccgagggcgtggcgctggagagtaaaccgacgacggataagaataccgtgttggagaccgggtttatcgggaataaaaaatacgcgggaaaagtgaatctgaatttgtcgggaggaagtctttttattcaataaaatgtatcaaacacatatatttgctaatggattacgattaatccataactatgttccgaataaagccgcttattgcgggttgattataaacgtggggagccgggatgaacgggaggatgaactggggatggctcattttatagaacacgtgatttttaaaggtacggagaaacgtaaagcctatcatatattgagtcgtctggaggatgtcgggggtgagttaaatgcttataccacgaaggaggacacgtgcgtgtatgccacgtttatggcaaaggattacgagcgtacgttggaattgtttgccgacatcgtgtttcattcggtgttcccggagaaggagatagagaaggagaaagacgtggtactggatgagataaactcgtacaaggataacccgggagagctgattttcgacgatttcgaggagttgatttataccggttacccgatcgggcggaatattctgggcgacgaggcttccgtggaacggatttcccggggtatggtgctggatttcgtgagacgtaattatttcacgaaccggatggtgattagctcggtcggggatatcccgttcgagaagttggtgcgtctggtggaaaagtatttttcgccttacgaggccggaactccattgaggacccggattaagccggaaatttacactccccgtttcgtggaaatggatcgggacacgcaccaaagtcattgtattatcgggaatatcgcttacgattacacggaggataaccgattagccttatcgctgttgatgaacttgttgggagggacgggaatgaattcccgtttgaatttgaatatccgtgaaaaatacggtttggcttataatatcgaggcgtcgtacacgccttattcggacacgggggtatccatgatttatttcggttgtgatccggaaaatgccgaatggtgtctgaatttgtgcaagaaggagatgcgggccttgtatgaagaaaaattgggacccttgcagttgaaacgagcaaaggctcagatggtggggcaactggctatctcgtcggagaattacgagaacttgatgttgtcgatcgggaagagtttcctgatttacgataaggtggatagtcttgaagatatttatacccagatcgaggaaattacaccggagttactgattcgggtggcgaaggaggtcttcgacgtggaaaagcaatctgtattactatataaatagagactgtcatgttggaaatggatgctgaattggaacaatatatattggcgcatagcgagccggagggggaagtgttggccgagttgtcaagggcgacccatctgaatgtattgcgtccgagaatgttatccgggaatttgcaagggcagttcctgaaaatgatatgtcggatgattggcgcccgtcgggtgctggagatcgggacatacacggggtatgccgctatttcgatggctgccggggtggaggaagggggagtgctgcacacgattgacgtgaacgacgagttggaagatttcactcgccaatatattgaaaaaagtggtttgcaggagcgtatcgtttttcacgtgggggatgcttgcgagattattcccacgctggatgaaatgtttgatttggtgtttatcgatgccgataaacgggaatattcggaatattatcgcttggtatttgataaggttcgtcacgggggaatcattgtcgcggacgacgtattgtgggatggcaaggtggcggatccgcgagtgaaaccggatgcccaaacgaaaggtatattggactttaatgaaatggtacaggccgatagccgggtggagaatatcctgttgcctgttcgtcacgggctaatgatcgtgagaaaagtttagaatttaaaatttaaaggctatctttgttctatcatctattgaaaattgaatagcgcattttcaatt

SEQ ID NO: 273 - DNA, 6104 bp, Butyricimonas faecihominis
gtaataaatagccttttttaatctttttttttaacgattctcgtttttacatataaaaaacatcacaaaacatcatataaaaacgcatttcccctccttttttcgcatttcgaagcacgaattcccttattattaaaattacagttcattggttatctttaaagtattgccatcgagaatcccgctcgtttccttgggaaagcgaagtaatattggtatatttgtatatataaaataaaccattatgataggaacctactttattattatagccgtaattatcggcttggctttcttaggactgggaatatccacttttttcggtaagaaaaagaaattcccggacacccatatcgggaaaaataaagccatgaaggaacgaggcatcagttgtgctgccacgacagatcgcttggaaagagcaaattataaaccgattgaaataaaaaaagcgaaataaaaaagggaggttttaaaagcctccctttctcatgatcatgtttcgatcatattattttttatacattcccaaatccttcaattcgaagtcattgataaatgctgcatatccggcaacttttgactgaccgtatttcacgaaaatctcggcagatttagcaaaacgatcgcaacgttgagagtctaataataacaggtaacccaaaatgatatatcctgccatttcaaccaaacgacgtgcatggaaatccacgtattcagtttctccaacagccgttactttcgtcacggcagcctcgaatgccccggtcatacctttcaatatctcacgaacatattcttgttccggacggatagaagcttgctcgtattcctcacggatttgtttcaagaattgtcccgtggtcacaccacgaatggctgctacgacctgcaactgagaagttccctcatagatattcgtgatacgtgcatcacgaaccaaacgctcaatcgggtaatccttcatgaacccggaacctccgtgtatctgcaaagcgtcgtaagcaatctcgttcgcatactcgctggagaacaatttcaataacggggtgaagatatcagccaacttctggtatttcttcatctcctcacgctcttctttgttcaaggtccgctcgttagcaatgtgcgtgtaagccttgtacatatctacaaaacggctcgtctcgtaaagcacagaacgtgcggcttgtaatttagcctccatgttggtcaacatctcgtatacagccgggaattcgataattgctttaccgaactgacgtctttcttgagcatatttcaaaccttcgcggtaagcggcctctgcaatacccacagattgagcaccaacacccaaacgggctccgttcatcaaagacatcacgtacttgatcaatccaagtttacgctctcccactaattcagccggagcatccttgaacaccaactcacaagtcggagaacctttgattcccaatttattctcgatacgacgaacggtcattccgccgttagccttgtcatagataaacatggacaaaccacgtccgtcatgcgtaccctcttctgaacgggcaagtaccaatgaaatgtgagcgtcaccattcgtgatgaaacgtttcacaccattcagataccatttgccatctttctcgcaataggtagcttttaactgtacagactgcaaatccgatcctgcatccggctcggtcaagtccatggcgtaagtatcgcccttagcggcacggggtaagtactgacgtttttgttcctcgttggcgaactcgtgaatcgtttcagcacaatcctgtaatccccaaatgttagcgaaaccgccatcaccacgggaaactaactctgctgccatcacgtaaggtaccatcgggaagttcaacccgtcatactcacgcggtaatgacataccgtacaatccggcctgagccagcatatcatgattctgttgagtcccggcagcatattttacgcgaccgtcaatcacttccggtccctcgtgatccacgccctctgcattttcagccagcacgttaccacaaatgtctcccacgatctccaacactctatcataattatccattgcatcctcgaaatcacgcggtgcgatctcgcatttccctgcatcctcgaaattgcgctctttcaaagcaacaatcttctgcatcaagggatgtcccaagtggaactttaaatcctcgttatctgtatagaaatttgccataccttttttaattttagatttagtgattctgtgatttaatgatctgcgattctgtgattaaaaaatcactcaatcgtcaatctcttaatcactcaatattatttgctgttcttcttataatactggatcatttttgggataaccacgttcaagtcacccgtgatcacgtaatcggcaaatttattaatcggagcgtttgcatccgtgttaatagcaattaccatagaagactcttccattccggcagtatgctggatttgtccggagataccgcaagcaatatataatttaggacgaaccgttgttcctgtctgtccgatctgacgttcgtgttcgcagaacccggcatcaacagcggcacgagaagcacctacttccccacctaaaacagaggccaattcatataataagttaaagttctctttagaaccgacaccgtatcctccggcaacaatgatcggtgcagctttaatgttcactttggatttctccatgtggcgctcgatcacctttaccaccaagtcggtatcatccaaatactcgtccacgttcaacttctttacttccccctgatgttgaagattgaaaatttctttcttcatcacaccctcgcgaaccgtagccatctgcggacgacattccgggttcacgatcgtggctacgatatttcctccgaatgccggacgaatttggtataacaaattctcgtatttttttccactcttggcatcggtatattcaccgatttcaagactcgtacagtcagccgtcaaaccgctatgtaatgcagaggacacacgaggacctaaatcacgtcccacactggttgctcccatcaaagccacttgcggtttctcagcgtcaaacaaacgtaccaacattttcgtgtgaggtaacgtcgtgtaaggagccaagcgagcatcgtcacctacccaaagtacgtccaccccataagggaatacttgtttttcaacatctttcagtccttcgcccaaagcgatagcttccagcttcacgccaagttttgttgcaagggcacgtcctttggtcaataattcgagactcacgtcagcaaccgtaccctcttctatttcgcaatatacaaatacactgttcatatcatttaaaattttagattttagattttagattttgtaaattccaattgcctcgtttcagaagttttcaatttaaaacttacaatttaaaatctaaaattacccgattgtatggttagttatcaactctttcatcatggcatccaattcggcatccgtgccggaaagtactttagcctctttcgcctggaacaccacactctcgatattcttcaccttggtcggagatccgctcaaaccgagatcttccggattactctgaatatcgttcacgctccattcggtcaatttcaaatacgggcgttcgttcaccaacgcaaaataatcctcgttggcatcctgtgcctcttgagtacccttcgcgttcttgtatttcatcacgaaacgtgcgtttctcggacgacaaggagcggcagaaccgttcacggtcaccacgcaaggcatcgggcaagtagccacttcaatacctctttccaaacgacgtttgatcgtcacgattttcccgtcacaaccttgaatttcttcagcataggtaacctgcggtaaagccaacttctcagccacctgcggacctacctgagcggtatccccgtcaatagcctgacgaccgcaaatgatcagatcatattccaaattgcgtaacgcgcaagataaagcgtaagaagttgccaacgtatccgaaccggcaaaagcacgatcagacaataaataacctccatctgcaccccggtacatagcctcacggatgatctcggcagcacggccgggtcccatcgtcagtacatgaacggttgtcccttcaattgtatcttttaatcttaaagcttgctctaaagcatttaaatcctcaggattgaagatggcaggtaaagctgccctgtttacagttccgtctgctttcatcgcatctttccccacgtttctcgtatcgggaacctgcttagcaagaacaacaatttttagtcctttcatattaatatccaattttatgttccaagtgacatgaagtattcctttgatctacaaccggagacatgaattcacgctacgaaatactccatataccaaatattttcaacactaataaaattttaagcgtgtaaagatactatttcaacttataaaaccaaaattttaacatcaactcttgccccaatgaccatataaaccattgaaataaaatatataacacacagacatttgcgcaagaatcgacttttggagtgattttattttctattctaaacaattcccctaattttgtgtcccgatgattcaacactaaaattattcacattattaaaaatataagaaatgaaatacgacttaatcgtgattggtagtggtcccggaggatacgtagctgccattcgtgcgtctcaattaggaatgaccgtggccgttgtagaacgtgccgaactgggaggtatttgcctgaactggggatgtattcccacgaaatccctgcttaaatccgcacaagtgttggaatacgcccatcacgctgcagattacggggtaaagatcgagaatgccgcacccgatttcgatgccatcatcgcccgtagccggggagttgccgataagatgagcaaaggaatccagtacttgttcaagaagaataacatcaccgtgatcgaaggtcatggaaaactgaccgcagagaaaaccgtagaggtgacaaacgctgccggagaaaagaccattttcgaggcccaacatatcgttctagccacgggcgcccgttcccgccagttgccgaatatcccccaggatggaaaacggattatcggttaccgtcaggccttaactcttgatcacaaaccggaatccatgatcgtggtaggctccggggcaatcggttccgaattggcatatttctacaatgccatgggtaccaaagtattgttggttgaattcatgccgaccatcctgccgcttgaagacgaggaagtatccaaacaagtaggtcgttctttcaagaaagccggaatcaacgtgatggtgaaatcttccgtggaaagcgttgaaagcggagaaggtttgttgaaagtgaacatcaaaaacaagaaaggcgagatcgaagtacacgaggctgaaatcgtgttgtctgccgtgggtattgccccgaacgtggaaaacatcggtctggaagaattgaatattgaaatggaaagaggtcgtgtaaaagtagacgactactaccgcacgaacgtggaaggcgtttacgctatcggtgacatcgttcacggcccggcattggctcacgtggcatctgccgaggctatctgctgcgtggaacacatcgcgggagtacacacggaaccgatcgactattccaacatccccggatgtacctacacgacaccggaagttgcatctgtcggcctgaacgagacaaaagcgcttgaagccggttatgaaatcaagatcggtaaattcccgttcactgcatcaggcaaagcgagtgcagccggggcaaacgaaggattcatcaaattaatcttcaacgctgccgacaataccttgctgggggctcacatggtaggaatgaacgtgaccgaaatgattgctgaaatggtacttgcccgcaaggtaaaagctaccgctcatgacatcatcaaaacggttcacccgcacccgacaatgagcgaggccgtgatggaggctgctgctgccgcttacgacgaagtaatccatatttagttgcagcgcaacgttacaggttacaaggttacaggtttaataaaattcaataataaataaac

SEQ ID NO: 274 - DNA, 6099 bp, Butyricimonas faecihominis
ctttttcatagtcatacgattatattgtttcattaaaaggtaggtctaagtatgaaattaaagctccgacaatagggataggaagtacctctttcaaatttaaccgtggaaagccgcccgatgtccgatgctccgatacccacgaccagacgtttcagaccgaacaatttcagcttttcaacattaaactcgtattgcaggttaatattcgaaatcgacaactcattcttacgctccacgaaacgttccgaaagataagtagcccatccgctttccgggatgcccaagaaacgggtctcgtccccgatctctttccatctttccgtgaacgcccgtcgatcgacattctctttgatgtttatattctccaccttcttcgccagtgtcgtgttataaatatcacctcccaacgtgtaagcagccgacacgcttaaagaaaaccctttataccggaacgacgtgaatatacttccttgtattgtcgggtttgtattccccacaaccacctgatcgtcgtaactgtaatcaaacgtgtattccccgtttttatttatatacacctctttacccgtggccggatcaatccccgcggaacgcatggcataaatcgcatattgagactctccctccttgaattgaatcttgggagcgttccattcgtccgaagacgtggtttccgagttcgtccgttgcaaggcattactgatcttctcgatcttgtcatacacatgcccgccattcaccgtcagcatccagctccaatccttcttttgtatgatctgcccggaaatagagaaatccaacccggcatttttagccgatcccagattaaccttcacgttatccacgcccatggaaaggggtacatctatcgggatcaacatatctttcgtcttctccacgtagtaatcgaattccactcgcaaccggtcattcaggaatccaccggtgaccccgtaattcattttcaacgtccgctgccactttaaatccatgtttcccatcgtgatcggtaaagccccgacacccgcataatagcgataatcattgctatacttatatgtcgtgatcgcctgataaggagaaaaaccggcattacccgtgtacccgtagcttacccggaaacgtagcgtgttcaaccaatcatatttcaaaaactcctcgttgtgaacattccacccgaaaccgacagaccagaagggagcgaaacgctgattcttaccaaatttagaggaaccggaagtccggaaaactccgttgacaaaatacctgttccggtaggaaagatctacatcaccaaagaacccgactcttgttgataatttctcgctcccgctaggagccttgtcatcgtatttcatcgcataactcaaatcgtccagttcgtccttcaagaaccccacggcagtgatctggctactcgtagtcttctcccttgaaatctctgtcccggcatgaataccgaacacgctaccatgctcatccaaagcgatagaatagtttgcaaccaattttcccgtgtacgaattcccgtcggaagagctttgcctgtattcccccttctgcgcaagctcttccggagaagtgtaattttcatatgccgaattttccggcgaggtatatttatcactcttcgaatccgacaggttcaaatcgaattgcccgttcacgaaaaaagacttgctgatatcccagcgcagggataaactatttttgatcgatttactcttagatttcgaaaaactggaaagcgtagcattgtataacggattctctattttctcgttgcgagagggatcgaacttgttgaaatagtaattccggatatactcgccatcctcgtcatacaccggctcgtaaggattcaactcggtgtaggttgaaaactgaccgtaaggagaatccttgctatccgtcatcccgaaagcaaactgataagagatcgtcaatttattcgtcatgtggtaagccaatgaaaaattaagaccgtaattccttctgtagtcccccttcatgaccccgtaagtatctttaaaagaagcagatgccttgtaatccatattacctccccgaccggcaacccgcaatgaatgagaatgactgaaagagtttctcaatggttttgaaatccaatccgtgtcaatccccttgcgcacgttttccaacttataggcataatttctgtcagcgttaccattagccgaattatacaacccggcccgacgttccaattctaacttttcagaggcattacacaagttcatggaactcaaatcggggaaactgaaatcaggaacaaaattataactgaaccgcactttatcatccttcacgtgagcccgttccaccacgatcacgccattggaagcccgttcaccataaagaacggttgcggctgcatctttcagtacgttcacactctctatatcgaacaaatccaaatcgtagagttcttcaagcgagatttcgattccatccagaataattaagggcgtgttgattcccgcctcatcactggtcatcaatgaattggtcccccggataataatctccggcacggcgttagggttcgatccctgcgcgttattctccacgattctcaatcccggcaccaaagtactcaacgcttggatcaggttcgtgctggatgcctgtaccagctcttcccccttcacggtggtcacggaacccgtgaacgtgtttttattcttcgtgtaaaaaccattgaccacaacatcatccagagccgtgtccgccatcttcagaacaattttcaagttaacgtcacgagtcaccggaatctcttgagaaaccataccgataaaattgaccacgagaaccatcccgtcactttccggtagctccagtttgaactccccgttcacgtcagaggccacgccaatcgtcgtgcctttcagcatcacggttgctcccggaagaggttcattcttctcgtcgaacacggtcccggtaatcgtaaccttttgctgacctctctttacctctttctttttgatcaccaccacgtcattcaccacggaaaaaacataccccgtgttgcgcaaacaataatccaaaatctggtgtaccgtcgcctgccggaactccttcgtgataagtggaatcccctttatctcctcgtgattatacacgaaattcaaagccgtcttctttttcaacgtattgagtacctccaacatggtcgatttctcaaactttaaatccagcttaatcgaatcattcaccaagcgaacgtccgaagcgtagattctcatagaactaaacaaaatgcagccgatcacgagagaccacctgatccatcccctgcatttgtccctgtttaacactcgattcgttttcatgtttatataattagttgttaataggtattcttttcgagagacaggggactttccccgcctcccggtatattattcggctttaagcgccttctcaatttgaagaatcaatgcccgataatgagctttcgtgtccttatccgcggtagataacttaccttccaacaattgtttcacccgaaccagcatgtcctgcaagtacaccttggaatcgtcgattgccgtggtagtcacttttcgctgccaaccgtacccgttcccgatattttcaagatgagcggccacgaaaccccgtccgtacacctgttctatctcccggaactcgtccagatacctactcaccatccccgtctcatccagcccgtaagcgttgatttcgtcaacagaaggagcaaaagcatcaccggaatgcaagtaaagagcctcgtctgtcaagaatggtaaacctttcttctttccttccatcccctctgacgaaacttcaacaatcacccgctgtaatatcttctcgctctcggaaagtttccggttattcaaggtagaagcccacacttcatgatacaaatcgtcaaagaactctttcaccgtgtaaggatcacgagacacgtgagcggaaagaaccacgttcttgtacaattcggcaacattcttcgcggcagcataccgtaccgtcggtgccagtgaaacgcccaaggcaaacttatccgtcagctccttatcggtcagccaattctgggttttcaactcccggatcacccatttaagcgagttcttttgtacctcccggggaaccgcaacaaagcgtttgcccggagttccgtccttcacctccgtcaagtaaatacctcccacgttatacatcacgttcttcagataacgatagtattgattaccgatagcttggtacatggcctgacgatgttgcccgtctggatcatcccccaaccactcgttcaaatgactcataatatacttcagattctgaatcccataatctcccgctttcaccggatcatcccccaaatcctcttctatcgcactaggatcaaaccgggcataaacctgttgccgtccataacggtacctgggatccccggccttctcatccaaccatttttctaggataggaacctcggccatagcatcttctacctcaggtagtggcgtgtataaccattttatgacaaactcgtcataaacccccaaatccggtggtgtcaatctcacccctttatcccccggctgagcgacataattatagcgggcgtaatccatgatggaaggcgtggttccgtatgtttgcgtgaaacttgccgagcgcaaggaatccacgggataagcggcagaagctgccatattatgcatcaatcccagcgtgtggcccacttcatgagcgatcacgtaagccagcgattctttcaccacatcatccggcatcttttttgcccggacacggggatcaacctgagccgtctgcacgaagcgccacccgttaatcaaccggattacgtcgttatagatcagcacgctggcattaataatctcccccgtactcggatccacccacgagggtcccattgcgttggccgtcgttgacgggatgtagcgaacacaagagtatttcaaattatcgggatcaaactctggatcatccaagggaaaatcccgcacctgaaccacgttcttgaacccgattttctcgaatgcggtgttccatcttaaaattccctccctcaagggttctttccacgattccgggaacgtgttatccaaataatacacgattggtttcaccggctccaccaactttccctgtttccacgcatccatatccttaggttccaaccgccagcgattagccaccgaatatttctgaataccgtcctcttccatggaaacgtacactttattccctaaaaatatacctaaccgggaatccgtgatccgaggacgcatcttgttttccggtaaaagcaacaacgtgcgtgtaacacgagtagtcaatggatcatccttctttaccgtgagcatacccatcgctttcgtcgtgaccagataagacaaaacggatttaatacttacattatcttcaaaagccttgatctcggtcaacatagatccctctttattcaaactggcagaatgactgagtattccacccgagttcggcataattggagacaaagaagattcatccttcgtgaacatatccgtcatgtcaaaaaccaccgcagaactatccggcgtgtacgccagcacccggtaagactcgacaataggatccccgaaattcttctccatcgcttcttctagcccggcctgtcccttgtcataagtcattttcgaattgacattcctcaaacagaccatactatccaataatgtaaattttatatgccggggagttctcggcttataacctaccacgcagatgctattatctgtcgcggaagttaccgtggaggccaataaaaattcccgtcccatgtactttaaaggcatttcaaaaaacaacttgccgtccaccttatgcaaggtcataaaaccacctttcgccaccacgtgtgccttgttcttgaacaactcgtcatatttaccaagcacaaccttcgtcgttttaggctgaacctctttctttttcctgtcaattccctgagctgaataaggacataacgctaccacgagcattaccgcagccagtatactccaatttttcatacatttaaaatttattatacga

SEQ ID NO: 275 - DNA, 6069 bp, Butyricimonas faecihominis
aaattaggattgattgtttgtttgctggtttctggggtgctacacgcccagaaaccggtaactgtggaatgtagtgtcggagaaggggtaggaacgactattcagttgttcggagtggataaaggagagaaaaaagtgctggcaagtgcttcttataaccaaaatggttattatggttttagttttatcccgaaatacgaaggtttttatgtcgtgggggatggtaggctttatgaatacccgctttatctgaaagcgggggatgccgtttcactttttatggataaagatacggtgtatctgacgggtaaacataatacggctgagaataaggtgttgtatgagtgggtaaatctttctaaacgggtgtgtgaaaaatcgacatatttcatgcgggtacgtaatagtacgtatgaagattttttcccggactttgaagccttacttgcaaagacagaaccgttttgcaagagtattaaaacgaaaaatactcgtttcaacgaattgatgaaatattttgtcggctgcgagttggatcggtttgcattgaattttatttataccccgcgttccaagcatccttctaaagaacagcgtatcgcctattatagtaccattacggataaaaataagtttacggatgagagggttttggaaatgcctgatggaatgaaactcttgaaatcgtacatgatgttttattgtttggagaatgggaaaagagggggagagttacaggaggctctatctgtcatccccagtaagaaattgcagggtgagttggtcgtgaatcaggcgaaaggtttcgggcgttcttatttcgaatatttggagtttatggaggaagctaaaaaatatgtggatgccgagcaattgaaagagttggaagctaaggcttctgccctctacgaggccaagaagggggagaaagcaatagattttgcctatccggatgccgaaggtaatatgcactctttgtccgactataaggggaaagtagtcgtggttgatgtatgggcaacttggtgttcgccttgtcggggagaattaccgcacttgaagaaactggagaaagcgatggaaggtaaggatgttgtttttatcggggtatctgttgacgagaagaagaattacgagaaatggaaaaaattcttggtagatgagcaattgcccggggttcaattgtttgccgatggatggagtaagataacgaaagattataagattacgggtattccccgctttatggtttttgccaaggatggcagtatcgtggaatctcaagctccacgtccttccgatccttctttacagaaaatgatcgagagtgaacttcagaaataattacaagaatgggacccagttgccgggtcccattcttgtaattatttcccccgattggattccgtgagtgaaaactccgggaaattctcttttacaaagcttttcggaagtttttggataacttcccggtacgagtgttcaatgagttcttcaatgaacttgtcggacagggtgccgtgcatatttatcccgttccagtatttcttgttgaagtggtaggcagaagtgatctccgggtatttttcccgtaattcgatggcccagtccgggtcacatttcacggcaatccattcgaatggcatgatgtccgtgcagcaaaacattttgttgaaaaccttaaagactaacgtggtttcgtcaaaaggaaattcttcggtcgtgtgaggaaaagagaggcatagctcccggagttctacgatgtccataaaattgatgttatttccacaaagataggaatttttgtttattccggtggagacttcatcttttctattcctgtttcggttacggatttcccggcttggggaaaataaagtcggttcggtacggctccccctgttatttttgtttcagaacaaaaaaatatgaaaatgaaaacaacagggaattttggaatattactatgtttttgcatgatgttactttcatgtaaagatgctgaacaaaaggaccgtcaacagggaatggtggtccgagtgacacaagctgtgaagccttccgagggagatcagaaagaattttcttttatatcgaagcctttccgtacttcggaattgtccttccgggtaggaggaccgatcaagcggtttgaggtgtatgccggaacgtattataaacggggagaggtgatcgcggagatcgatcctcgtgatttccgaatccgaaaggaacgtatggaggcgcaatacaatcaggcgaaggccgaatacgagcgtatcgaagtcctttaccggaaaaataacgtttcagcaagtacgttcgagaaagccaaggcggagtatatttcggcgaagaccgcttacgagacagctatgaatgagttgaacgatacccgattggtcgctcctttcgatgggtatgtgggagaggtgtatatcgaggagtttcaagatgtgaaagcctctcaacctgtcatttcctttgttgatctcggccagttgaaactggaggcctacgtgacacaggagatcgctttcggacgagggaatgtccgggaggttgaactggaatttgatgccatgcccggtaagacttataaggcgaaggtagaagagatttctaaaagtacgacctcgaacaatttgtcttatctgttgacagctttattgccgaatcgggaagagcatcttccggcaggtatgtccgggaaactattcctgcgctcggatggcgctttgcaacaggcgggtgtgattgtcccgcagaaggccgtctgtcatcgcccggtggttggcgattatgtctggacgctgaatgccgatgggaaccgggtaagccgaaaaaacgtgactttagggacattgttgccgggaggagagatcgccgttgtggacgggttggaagcgggagagacaattgtcgtgagcggacttcgttttttgtcggagaatatggcggtgcaagtggctgacgagaaacgtatttaatggattcggttcgttatagccctttttaagggaagatattactcgctaaaaagaatgttatcatgaaactggttaaatattttttacagaaaaagtctctgaccatcctgttgcttttgcttgtgctgttagggggattgttcgcttacgtgaaaatggggaaactggaagatgccccgttcacgatcaaacaggctttggtgcttaccccttatccgggagcctctccatcggaagtgcagacgcaggtgaccgacgtgttggaggaatccatacagtcgttgggggagctctattatttgaagacggagaatcgggccgggctgtcaaaaatcacggtttacgtgaagaaagagatccgggcggatgagatgcagcaactttgggataaactccggagaaaagtgagtgatgtacagggaaaactaccggcaggagcggggccttctgtcgtgaatgatgatttcggggatgtgctgggtgttttctatgggctgacaggaatgggacatacctaccgggaactggaggatcaggcgaagttgatcaagaatgagattcttaaggtgaaggatgttgccaaggtcgagatatacggggtacagaccccgacgattgatgtgaaaatcagtccttcggtgatggcacttagcggtatcacgaccgcggatattgcccgtgctttcgagggacagaataaagtggtggatgccggggggatagatgtcggggagaatcgggtgcgtatcgagtcaaccgggaatttctattcgttggatgacattcggaatctgaccattgtttctaaaggcggggagcatttccggctggcggatattgccgaaatcgaggaagcctatcagactccggcttccaatatgatgcgtgtgaacggggaacccgctattggtattgctatttctacggttccgaaggggaacgtggtggatatggccgatgcggtaaaagaaaagatagattggtttacatccgagatgcctgaaggatatgctctttcctgcatttatgatcaagggtacgagtctgccgtggcaaatcgggggttcattgtcaacctaatcgtttccgtgctgactgtcgtggcgatattgctcttctttatcggttttaaaaacgggttgttaattggcagtgggttggtgttttccattttcgccacgttgatcgtgatgtttgctgacgggattgccttgcagcgtatgtctttggccgcgattatcattgccatgggtatgctggtggataatgcgatcgtggtatcggactccgcattggtgaatatgcaacgggggatgcgcaagcggatggccattatgagggcttgttctgcgacggctttgccattattagccgcaacggttattgctatcctgacttttatgccaatttattattcaccgcatattacgggggaattgctgtcttcgatggttgttgtgatcggggtgtcattgatatttagttgggtatttgccctcacgcaaacgccgttcttcatacaggaattcgtgcgtcgtccacgtccggacgagttgacggcagagttgtttactggtaaatggtatgatcgtttccgacgctcgttacgggtggtgatccgtcataaatatgtggtggtgggttgtcttgtggttatgctttgcgtgtcggcgtggagtttccggtttatcccgaaagttttcgtgccttcgttggataaacaatatttcacggtcgatatgtggttgccggaagggacccgtattgaagaaactgaccgggtggcggacgatatggctgattatgtcagcacttatcacgagatggagatggtgtcggcttttgtggggcgaactccaccacgatattatttatcgaacgtgtcattcgggccccagtccaattatgctcaattattgataaaatgtagaacatcgtcggaatcccgtcagctacatgccgtgttacaagattctctcccggcgaaatacccagaggcgtttatcaaggtgaatagtttcgaattgagtccgttgaacgaggcgttgattgaagctcgttttctgggaccggacccggcggtgttggattctttggtgggtgttgccgtggatattatgcgtcgcaatccgaaagtggcggatgcccgtaacgagtggggaagtatggcgatgatgattcgtccggtgtatgatcccgtgaaggccggggccttggggatcacgaaggcggatatgatgcagtcggtgaaatccattcaagacgggttgacggttggcgtgtatcgggatgacgagaagaaggtacccgtgttgttgaaatctgccggggtgaatattacgaatgccgaggctttgggtaatttctccgtgtggaatggggtgaattctgcccctctgtcgcaagtgacggaacggattgaaaccacgtgggagttcccacaggtacggacgtacaatcggcagttgtccatggccgccatgtgcggggtgaaaccgggtactactatggcggaagtacacggggagattcgggcagaagttgagaaaatacaactccctgagggatatacattcttttgggatgctcaattcaaggatcaaaaggaggccatacaggccatcgtgatgtatttcccgttggcattcctgttgcttgttgtcattctggtggccttgttcggaaacttccggcaaccaatcattattctttgcgtgttacctttgtcactgattggcgtggctgtcgggatgttgctcacgggatttgatttcgggttcttccctatcgcgggatggctgggattattgggtatgattattaaaaacgtgattgtgttgattgatgagatcaacgtgcagcacgggaacggggtggacttgtacacttgtatcgtggaggccacggttgtacgtacccgtccggttttgatggctgcaacaaccacgatcttcgggatggttcctttgttgtttgatattgctttcggggggatggcagccacgattattttcgggttgacatttgccacgctattgacgctgtttgttaccccggctctttatgctatattttataa

SEQ ID NO: 276 - DNA, 6047 bp, Butyricimonas faecihominis
ttgtaaaacttctcatacaattgaaaattgaaaattgaaaattgaaaatgagatatacactttcaggtttcaattcagattatattatcattttattttactcgcatggctattccggaaaccatcaggacaacttcgtccgcccgatctcctacatattgattcacccatccctgcaaatccgtgaaccgccgctgaacaggggcaatagaaactccccccattccgatctcgttcgtgacgaaaataaaagttgcctcctgcccggtaaaccggtcgaactcttcctttatttcccgcaaagatttatccacgtcggaatcattgtcaaaaaagaaattggtactccacaaggtcacgcaatcaatgaccacgacccgccccgacacgtcacatcgactaatcgctttttcctcttccaaattggtccattgcggaccccggtcctgttgatgacgtctcacccgttcccggaattcatcatcccacaccctcgaagtagccagatatacgggattctctgccaattttagcgcaagctcttgggcataacgacttttcccggatctttgtcctcccgtaactaaaattatttttcttttcatcatgacgacaaatttctctgttttttcaagaaatacaaagtaatcgcccgaaaaatctacaactttatttccgactccatcccagcaaaccatccacgatgattcccaacaaaaacaatcaagcaccccgacaaatactctaaagattcaaaattgtttactaactttgtgagttagaagtctaaaaagaagtgatgatggaactcatattatcccgacacggggaaacattagaaaatcaacaacatatactccaaggccaacttcccgggaccttatctccattggggatagcccaagccgagagactggcggagatgctccaagaggaaacgattgacaacattgtttccagtgatctggcccgaagttataacacggcggtcgccgtcgcccggaaacatgggctgactcctcacccaactcccctcctgcgggaaatggactggggcatatacacaggtaagcgcttggatgacgtggactggaccaacctgcctcccagcgtggaatccctagatgctctcttccaaagagctatcgatttcattgcctatttaaaaaagaatttctccggccaacgggtagtggccattggacacggagcattcaaccgggcaattatcgcgtacctcaacgggaaaaaggctattgacatgatcgaccttcctatcatggaaaacacaagttgcctacgttttacgttagtggacgacaaccaaacagtataacccaattgaaaattgaatctccacattttcaattttcaattttcaattttcaattaacatgagaatatacacgaaaggcggggacaaaggaacaacaggaatattcggcgggagccgggtggacaaagatgatattcgtattgaaacaaacgggacccttgacgagctgaatgccacattaggtgtcattcgagccttgctagacgagaaggataaacggcaagaaattctggcatacatacagcgaacgttaatgatagtcatgtcacaagtggcaactccctcaaacatccgggaacaaaaccagaacatcctaccggaagatatagaccggtattgcgaacaacaaatcgaccgtatgaacagcgagatgcaacacccgtccacccatttcatcctgccgggcggaacgctgatttcagcccaatgccacgtggcccgcacgatcgcccgccgggcagaaagaagattatgtaccctaaacaaaacagacgaagttcccccacttatcctgcgattcgtgaatcgcctctcggacttactatttaccatggcccgctgggaaatggatcagcaaggtgcggaagaagagagatggaaagcgttcctttacaaaaaaaagaatcaatgaatagcgttcgccttgtgcggctggaatctaaaatctaaaatcattaaatctaaaatatacatgtcttttcttcgttcaatcatgtttgtcgggacctgctcggatgcgggtaaaagtattgttaacacggcgttttgccgaatattcaaacaagatggctaccacccggcccccttcaaggcgcagaatatgtcactaaattcatattccactcccgacgggctggaaatcggacgggcgcaagcggtacaggccgaggcatgtggcattaccccggagagcgacatgaatcccgttctgttgaaacccacgaacgaacaatgctcgcaggtcgtactcaacggaaaaccggtcgggaatatgtctgccagagaatacttcatgtccaacaacaaggccgaattattcaaccaagcatacgctgcctatgaacgtctgcaagcccgctactctcccatcgtgctggaaggagccgggagcatctcggaaatcaacttgcgggaaagagacattacgaatatgcggatggcattgcgcacaaatgccgccacgtatctggtggcggacatcgaccgggggggagtgtttgcctccgtctacggttccatcgccttgctttcagaggaagaaaaaaaattgattaaaggaattatcatcaacaaattcagaggagatatatctcttttcgacgagggaagaaagattatccacgacctcacgggtatacctgttgtcggcgtgattccctatttcaaggacatttatatcgaagaagaagactccgtctcactggaaaccaaaaacaccaaagccgggagcggcaagattaacgtggccatcgtactcctgaaacgcctttccaatttcacggacttcagcgtactggaacgagacgaacgatttcatgcttactacacgaataacgtggaagaaattggcaaagccgacatcattatcctaccgggaacgaaaaacacaatctccgatctgcgaaacatccgggcaaacggtatcgcggaggcagtcatccgggctcacaaggaaggtaaaaaagtgatcggtatttgcggggggtaccagatgatgggcgcccggatcgaggacccggatcagatagagggtgacatgaccgccattcccggcttgggcatccttcctcttgtcacgatcatggaacctgaaaaagtcactcgccaagaccaattcaccttccgcaatcacccggaaacctgcaaggggtacgagattcacatgggtcgaacaaccttgttggacggggttccggaatctcccttgaaccgtttacacgacgggcgaacggacggctatatcttaaacgaaagatgctggggtagttacctccacggaattctggacaatgacatcgtcctcaacgaactggcagaaggactgacccaagcaacccccacaaccttcaattataccgatttcaaagatcaacaatataacaaactggccgatcacgtacgcgcacacgttgacctgccatacatttattccacccttaaaaccaagtaatatgctgaacggacacggagatgacatatacaaatcaaacacggaaataaaagctaatttctccaccaacgtatggtatgacgcggacacggatattctccgttccatgctgatcacccaaatcgacaaaatattccattacccggagcctgccgccgaatcattcgtacgggaagttgcccggttccacaacctgcaaccacaaaacgtgattgccggaaacggtgccacggaactgttttacctgatcgcacacgctttcgaagggagtaaaaccatccttcccattccctctttttcggagtacgaagacgcttgcaccctttacaggcaccaacagatattcgtacccataaaagactttcaggcaggccccgcagacttaatgtttatctgcaaccccaacaatcctgacgggcacgtgtggaagctggaagagattgaaaatattttacaacaataccctcaaatgacacttgtcgtggacgaatcgttcattgactttgcccccacggcacagccatccgaaccgttattagccagttatcctaatctactggtcattcattccatgacgaaaagttatgccatccccggattacgcttaggctatatgttgggcagcgaaaacctgatagaccggatcaaacgcttcacccacccgtggaacgtgaatgcactagccatcgagatcggaaaattcctactgcaaaatggaaaataccttctacccgacacgggcaggttgctcaagcgtaaggagaattttgtccgcgctttcgatgaacttcccggatactctcccgtcccctcggaaacctcgtttttccttattcacacgatacataaatcccacgtgttaaaacaggaactattgaaacaattcgggattctgatacgggacgcctcgaatttcagaggtctggacgaacattacttccgggtaaacacactctcggatgaaaaaaatcagatgctactccgggcgttgagattattatccatcactgatttataatcggttaccatgttctcgttttcaatcgtcatcgtccctctcatcatcgggtatcttctcgatctcatttttggagacccccggaaattacctcatccgatcgtagccttcggaaatattatcggatggtgtgaacgacatttcaacaaagggaaacacaaaaaacgaaacgggtgcctgattgccatcatcctaccactttccacactccttttagggggacttctcgccttaggaagctggatgctccaccccttcgtgtattactgcgtcgcctccgtgttcgttttctacggattggcgaaccacagtcttatacaggaaggcggagaagttattcgaacccttgaagaacaaggattggacgccggacgaaaacgcttgtcgtggattgtcggtagagacactagccaacttcccccgagaaaaatatataccgccgtgctggaaaccatggcagagaatttaagtgacggggtagttgcccctttattcttttacgccttgggaggatttcctgccatgatggcttataaaatggtaaacacgctcgactccatgatcgggtacaaagatgcacgttacaaagatttcgggtgctgttcggctcatctggatgatgtactgaattatatcccggcccggctaacagcacttctgatcgtcctgtccggctaccggaaagggatcttttccttcatccgaaaatacgcccgccaacatgccagtcccaactccggttacccggaatccgctatggccggaatcctcgattgccgtttcgggggaccgaacatttatcacggaatactcgtggaaaagccttacatcggaacgaacgacagggaattatcgattagggattacaaacgtgccgcccgcatcaatcaatcggtatgcctgatcacggtaatccttatttgccttgttttcataccattgatataaaagaacgaggggccaccgatgttgaagtgacccctcgttttttttcgaactaatttatttccgttctcctaatttatcatccagataaatcaagttatgaccgttcatcatcttgattctatcaacaatagtctgtgcagtagactcttcttccacttgctcgttcacgaactcattgataaaattctgggcagctttgtcattctccttgatagctacatccaataaatcatcaatcaacttagaaacatgacactcgtgttgataaacatgctcgaagacttccaaaacagaaccccatgctgtcggtaccacgttgatctgaccaatttctacattcccgttccgtttgatcacgaagtcaatcatttcataagcatgattcaattcctcttttgattgcgctctcatccatgatgccatcccgtcgtaaccattctgtgcaaaatacacggacattgacaaatacaaattggatgaccacatctcagcattaatctgagcattaaacgcctttactaaattttcgctcaacataattgtttatttaaaatttgatattcactcttccaaat

SEQ ID NO: 277 - DNA, 6040 bp, Butyricimonas faecihominis
cttttataatattatattctaaatacaaaagtaggccatcgagatcgcccgaaaaagacaactttagtccattgccccgcggtaaatcatacatttttgcggaatttctgccatttttgattttatccataccataaatagacgttggcattgcatatcctccatctcagaggatttaccattttgccattctccgaaacggagaatcattcaagaggaagaatctattcttaaaacaacccgcgttttaacgtaatattaaaaaaattcctctggatttatgtttatatttgattattgtttcacaattatctgaatcgagtatatgactaaatagaaccaccatgagaaaaaaagatcttcatgataaattcatcgaggaactacacaaaagaaattccaagagagctgaacttattaatcaggtgtcggacatactgaaactggaaaaagagtcggtctaccggaggatggcgggtaaagtaaatttttccatccgggaaatgggaatactggccaaaattctgaatatctcgctcgatagtcttttataccaagaagaagacatccaatggctcccattcatactggaaaccccgttaaaatttcactctatcgataccctatgtgacatgatagaccttaattttaaacatatcgaagagatcaaccgggacgaacccggcacgagcgggaatgtctaccactcgttgcctctggaatgtttcatacattccccgcttatgatgaaattcatgttctttaaatgggggtactatttcgtgcaatccgacgagtataacaatttttcccagtggaaacttccccctaggttgtcggctatcggtgaaaaatatcatcacgtgtataactttcaacacgttttttatatttgggatagctcgctaatttgggcattatccaaagagataagtaatttttacaaaacacatattatttccgaacaggaaaaagaagacatcaaaaatgaactcaaacttatactttcacaattagaaaagacactaaacggaacccgtactccccgcattcccttaccatccgaaacagattttctcgtgtcgtcaatcaacgtgggcttttccagtagttatttcttttccggcaacaaacatctcgccttgctccaaacgaatttcagcttttcgatgatacaggattcggaagacaatttcaataagataaaagaatggattaactcgctatgccatatttccacccttctttctaggagcggacgcatcgagagacggttgtttttcaacacgcaataccggattatcgacgaaatattgaaataataatgggactgtacaaaaagtcaattttaaacaactacccccacgaactccccttacatagggggggggggaaccgcttggtaatcagctctccccctatgcaaggggaagttggagggggtagcttgtagatactggataagacttttttgtacagccccattatttcaatatattttacactaagcgtctatctctgcctcttgttcaaaatcgcccagcggctttaaattggacgggatttcttgctctgcgtcatccgagaaataagggaacacatccatgatattcgtatcggtcagagaactgatctcgaaaggcaccacgtaggttgacaaactcttctgcaaattagccaacgccttctcaatatccgctgccgccaccaaataatactggtgagattttttctccttaccactgatctggtccgcatcaataatcgccacttttgccttgaaccatttatcgtcattcccgtcattcgactccaccaactccgtgatgttcgatttcttcaaccccacgatataaaaatccccttggatcatctcccgcagattttccgtgatccggctctccgcctccgtgtaggacattgcatctaacaaatacaactcagacatctttttctcttttccatcctcgcccattttcacgtattttaccttcgcttcaaaccaatttgctgtcatttcttctctatttttatgtgtttaattctacagcaaaagtaaaataatctccccaaaattattccacgagttacaaaaatattccgcatacaacacgtacgaatcattaccttgttgacgaatacgataaacccatgttgcaagcgatcaataatgacgagttgcaacggctgaaaccattttacggggctttgaaaaccatggacggggacataaaatttgccttaggaattcggtagctactagttcgaaacaggcactttctcctacttagtcgaattattgaaacaaaatcattataacctcgaacagatgtctcatgaagagacaaattccgaggtactcaacagtatttatgccgacgaaagccctatccccgtgatttatcaaagcgggtatctcacgattaaggattacgatccccgattcgagaattatattttaggatttccgaaccgagaagtagaggagtgatttatcaaattcctaatgcccttctacacgaacgtgaacaaagtggaatccccgttcgagatacaacaattcacacgagagattgaatccggccaaccggatgccttcctgcgtcgcctgcaaagcttctttgccgatacaccttacgagttgatccgggatttggaagtacactatcaaaacgtactttttattgtttttcgtcttgtaggtttctatgtgaaagcggaatatcacacatccgagggccgggtggatctcgtactgcaaaccgaccgttacatctacgtgatggaattcaaactggaaggttctgccgaagaagccttacaacaaatcgaagcgaaacattacgcccgaccatttgaagcggattcccgacagttgttcaaaatcgggattaactttgataataatactcggaatatcgagaggtggattgtggaataacttatctatattggctaaaagaattacatcccattcgatcaatctcgaatgggatgtgttgaacaaatagatttatttattgtacaattaaacttagctctgcaggcggcatacacatttgatcattacaactttggtattcaatgacacaagtcacgttccccgttcctagaacttcttgagtaaatatcgcctcttcttccacgacaacagttctggtaccattatacgcccgtcctaaaggtcgctttaactctcccaccttttcaactcctttcggtaaaacaaaagttattgtcgtgggaagataaggatcacttttatccacttgggtataaattcgatatcccggatggattttcatccgaattgtaatcaaccgattcccattcgacattttctttgtgaaagcctgtacttttacaggttccttttcatccgtatcctcttctttcaacgttttttcctcgatgggttctttaattgattccgtacacaaaacacgataatcgtttcccggcacatttttatcccgagtgtttactaaaaagaaccatcctccggattccgtaaaaaataagcgagatttatttgtttcaaaccaagtacgccattctgccggagtctcgaaacgacaaagcgtgtatctttttaacaaacggtgtcctttcgccacgtctgttccctcttccaacaaacggatcgcctcatctaaaagacgaatgtcatgattagagattcccagacttcttgcatcctcatccaaaagaaaagagacccggcccggtcgaggcataaaataaccagcattattcatataataatccttgtacgctttttcatccgtaccaaatgaaaaatacaattccgggaacatactttttaaatactctccataagtcgattcttctttcccgatcctttttaatgtagaaacccgctcttcgtacgcagcacgagttgcccgtaaaatcgttgattttaagtgtttctcggtcacgataaacggattgaacttcctagctatcggggcctgtcctgcaaattgggaaatatagacaatcgcgttggcaaatactgattttgcctcctccgtcatctcttccggtgaggctgaaaatccccaatgcaagaaattcccatgtcgtccgatggccacttcctccaagccttttgcagacacgccacctgaaataaattctacatcaggagaatccagaaaaccggcagacttggagatcatccccgggcgtatggctttcgttgtatatccttctttttgcactcgccacatcaaaatggaatcaggcacgacctctccttcggatttcgcaatagatttagcactttccggtgtaggtttcattaccatactcattttaacggggaatggtcctttaaacataggatgttctgtacgtatgtgatgagcatcagcatccaagcacagacagcaccagtccgttttcaacccaagacgagcaccaattaaactactcaattctgcaatcaacaacatgggtcgatcaaaatcctgtggtaaatatccttctcttttctccccgtaaaaccgtccaaagggatcttcttgcatagtcggaggaactatcggttgaggcaatccgtccatcacggtaacatcgtaatcctcagacaacactggctggtagtctttcgcatcaatagccgttacatatttaaaatattgtttcagcagtttttcgaaggccacagtccgttttttagccccttccaacaataatacagaatccaccttgcctctgtttatattagcgtacacgtccgaagatcctccaacataaagcactttcagtttacttttccttatccctgcctgcaaatcaaaacataacagaaataacaagcctaatagaattattttcatatccgaattttatttattccgaatcaactcttcaattttattttttaaagcctgatcacgaagattatcttcaacgacaataccattttcatccaccaaaataaacatcgggatcgccctaccgtcaaacttttctgcaaaaacattttccgtatcaattaaacaaggccaaggtaattgttcttcgtcaagagctttcaaccaatcagcattactcttatcgattgaaatactgattatctccaatccttgatcaacaaggtcctgatacattttcttcaagaatggaatcgacttgcgacaaggtccacaccacgaagcccaaaaatcaatcaatacgcatttctttcccttactcaattctttcattgaatataccttttcattccgatcaggtaaagaaaattccggaactgactttcctttcaaagtcttgggaaatatttgtttcttcaaagcctgaccgtaaaaactattcttcgcctcttccgaaaaaccattgaatagttccttagcttctgtatcatttgacgagaaataagccctgttattcagcaacaaaagaggtccccaaaatgaatctccgtttgccgccacgctatcatgaatgactttttcaatcgtttggaaagcctctctttcagctttcaccagattcttataatcatctgtctgcataaaatcagttatcacttttcgatctccatttttccttaattccgatattttctttatcgtccctgcatgtgcctcccgataatcgacaaacatttgatctaacttttcacgaaaagccatcttctctctgaagatttgatccgtcacagagcctttcaattgaacatctttcagttccacgtatggccttccttcttgttgttcccctctcaccgcagaaaaagtaatatcactattttccagcataaacccgtaagtaccccgtactcctgtcggttcttcgattgtcaacatataataacgaggttccaccaattttcctacaaatgtgaatttcccatcctgtacagttgtttccatctcctttttctcatcttgatgcgtggctgccaatgtcaggctaactttcgtattgtcggcaaaaccatagagcattccggtgattttatagttgtcagatttctcacatcctcctccaataaataacaggataagaacaacagatatattaacat

SEQ ID NO: 278 - DNA, 6034 bp, Butyricimonas faecihominis
ggatcagggcgggaattcagtaattttagattttaaattctgattgtacaaatccaatgtttcttaattttatcatgttttgactcgatactattttttacatatgtaaattgaaaagtcgggaattttacagacctttggggccgttaatttaaaaagcagaaaataaaatgcggcagttgaaaggtgtattattagcgatgatttcatcatccacgttcgggttgattccattgtttgcccttccggcaatgcaagagggggtgggattggactccgtattgttttatcgttttgccatttccgcggtggtcgtgggtgcctatttgcttttacggcgtgtggatcttcggataactttaaaggagtttggaacgatgttcctgttaggaggagcgtatgcctctacttcactttttctgacagcatcttacctgtacattcctagtggggtggccacaacgattcattttctttatccggtgttggttaccgctatcatgattgcttttttcaaagataaaatatcactctcggtaatcattgccacggtactggctattctgggagtctatttattaagcagtggtgaaggggaaggagtgacgagtttgaaaggacttttcatggtactgtcgaccgtggtgacttatgccatatatatcgtcggggtaaataaatcctgtatacagcacatggatggattaaaaatgaccttttatatgttattttgttgtacaatcatctttggagccaacattctgttaaaagggcagggattggatatgatgccgaatgcgaatgccgtggtgcatatctttttgctgtctttaatcccaactcttgtgtccgatttaacgttaatattggcaatacaacacgtgggatcaaccacggctgctataatggggtgtatggaacccttgacggcagtaagtatgggagttttgtttttgggagaacgtttcgggttggggcagatactgggagttgttatcgtgctggtagccgtgttcatcgtgatcctgtccagtcatccgggacatttttctatgaaacgtttgatcccggcatttatgaaaataagaaaataaaattaaagattcgtgttatggtaaatttgattagaataacggagccgacagatattcgtttacaaaaacttatcccactctataaggaggctttcccggaagaggagaggcgaaatatcaagcaattggaacggttgattcgagaaaaaacagagatgcattttaatgccatagagacggatggtgttttggccggtttatttatctactgggatatgcgggatttttattaccttgaacatttagccgttttcaccccaatgcgtaatctgaaagtcgggcaacaggtgttggattatatcgcggaacatttagacgatacgcgattgttggaagtggaaccgaccacggatgagatgaccactcgccgggtgaattactatcgtcgtaacgggtatgagattctcgacaagacgtacatgcaaccttcttacgatgaagacattgaagtcggtaatctttggattatggggaaccggaaatccgatcgtttacaggagttcatagagcggataaaacaggtggcttatagggaaaatcgataataatgaaactttctttaggcgtgctacttatttaatgataacctacactttcgctaaagttaaactatcctttcctttgatcacgaacatagcatgaacacatcaagtacatagcatgaacattggtgtatgtatatgctatgttagtgtcgtgtctgtattcccttggtgttttagtgtaaggatagagaaggggcggctgaaaattaagtttactataaggggagggaggaaaaaagataaggatcgatttctcgatccttattttgtagcgggagcctgactcgaacagacgacctttgggttatgagcccaacgagctaccaactgctccatcccgcaatattagtcaaaacatcttctgttttgcgtctgcaaagatagtacatatttatcgtgtatgcaagtatttccttctttttttagaataaataaaattagttgtcatgaaaggaaagaaaaacgggagcaaccatcgttactcccgtttgatatttagcgtgttagaaaattactttcctaacatttcacatacttcgttgaatacacattctccggtgaatccgaatttctcatccaatactttggcaggggctgagtatccgaagtggtttacaccgtgaatacggccattgcaaccaaccaaaccttccaaggtaacagataaacctgctgtcagtccgtatttcggtttgttagccgggataacttgttcttggtatgcttgtggctggtgacggaacaaaccttcagagatcacggacacgatctgtgcggtgattcctttccgttcctgaagaagtttggctccttccaccaaagtagaaacttcagaaccggaagcaactaacacgacatccgggttctctccggttttgcataccacgtaagcacctttttccgcttgtaaagcctcgtcataacgatctgttcccggaagatccgtgatgttttgtctggacaggatcaaagcggtaggggtggaggtgttttccattgccatcttccaagcaacggaagtctcggctgcatcggcaggacgcaaagccaacaaactcatctttccggaatgattctctaatttctccatcaaacgcaattgggcttcatgttcgatcggttggtgagtcggtccgtcttctcccacgcggaaggcatcgtgagaccaaacgtatttcaccggaacttccatcaacgcagccaaacgtacggcaggtttcatgtagtcggagaacacgaaaaaggttccgcaagccacgaagatacccccgtgaagagcgataccgttacagattacagccatggtcaactctgcaactccggcttggaagaatgccccgctgaaatctcctttcacgaggttgcgggctccacctttgataaatccgtcggtcttgtcagaattactcaagtcggcagaagaaacgatcatgttctctacctgttgagccaaggctaccagcacgtcagccgaggcggcacgtgtggcaatgtttgctttatgttgaattgctttatagtcaatttcgggagctttaccggataagaatttgtgcagtttggctgctaattccgggtttgctttttcccaagctgcctgctctgcttttttagctttggcgtaagcccgtttttcatcaagtactttagcgtagaactcggctacttccgggaagatcgtgaaggggttttgcggatcgccacccaagttttcaatcgtcttttcgatagaagccccggccccggttaagggttgtccgtgagtggaaactttgtcggagaaatcttccccgttagcacccatggcacctttacccatcaaggttttaccgataatcaatgtcggacgttctttttcggcattggcggcttgtaatgctttgatgatctcgtcagcgttgttcccgttgatcgtgatcacgttccagccccaagcctgatatttggccgcggtatcctcgtgagttacttcatttacacgggtagataactgcacttcgtttgcatcatagaacatgatcaggttggataatcccaatgttccggcaatacgtccggctccttgtgaaatctcttcctgtatgccaccgtcagagataaaagcgtacgttttgtgggccatccattctccgaaacgagctaccagaaaacgctctgctatagcagctccgacagccatggcatgaccttgaccgagaggaccggaggtgttttccacgcctcgtttgaagtccacctccgggtgtccgggggttacacttccccattgacggaagtttttcaagtcttccatgctatacgtgccgatcaggctcaacatagaatacaacatcggggacatatgtccggggtcaaggaagaaacggtcccggtttgcccatgtcatatcatccggatcgaaattcaagaattgagaatacaacacgttaatgtaatcagcgccacccattgcacctcccggatgccctgatttggctttttcaaccatagaagctgaaaggatgcggatgttgtccgctgctcgattaaggatcttatccatgcctatatttttttgatgaaaattttaaattttcggcaaaggtatgcttttctgtcgggaaatcaaagtatctaaaaattaaaagcgtgatgggtatgtcgatcatgaatctacaccgttttttcccggttacaggccgtgatcagtagggaagttgttgctaacacgctgccgattcccgcgactccggcccatccgaaccaatgccagcaggttccggcaagaaaggtccccaaggagcctccgatgaaataggtcgtcataaagatcgtgtttacccggttggaggcggaagggcaaagttcgaacaaagaggtctggttactgatctggatacattgcatcccgatgtcaatcaggatgatgcctgcaataatggcaatgtacgagttttgtccggtataaaggattgaccaagagaggagaattaacccgcaaccgatgaagttaaaacgttggacacccacttgtttcacgtattttccgacaagtgaggcagataaggccccggcaataccacataatcctaacatcccgataatattactcccggcatgaaagggagtttgtcccattttgaatgccagacaggaccatagcgttagaaatgaaccgaaacataaaccggcacgaatagggtagaggcgcacttgcggataggttttcaataacgagaagagggatttcatcagttcgctgtatttaccttggaaattaggttgaatatccggtaggactttcataactaccacagagcagagtaacatgagaacggctgcaatatagtacatttctctccacccgaatatttctcccacaagcccgctgactacccgtgaggccagaattccggttaaaagccccgacaccacgattcccacgttacgccccttgtgttcgggtcgggagaattgtgaggctatcgggataaagatttgcgggaccatggaacagatacctgtcactagtgaggctcctagaattacgttgatcgagggggccatggctatggttaaaagggagaggatcagtagggaaaagttgataatgatgatctttttccgttgaaacaagtctcccaatggaacgataaagagtaatcctatcgcgtacccgatctgggttatcatggcaatcaagttggtatgaaattccgatacgttcagatcttgacgtatcatgttcagcaaaggctggttataatataaattggcgacggatattccggctacaatagctaacgtccacaagatggaggccggtaaaccaccgttttctttaagtgtctgtttcatgccgcaaaaataagcattgaaatcagaatatttaccacttcgtgtaaggatattttgtcaacatggcgttataataccgattgtctccggtcacctctttatcaagccacgcaggtttcgtgaaattctcattttctgtttccaattcaatctctgccatgactaatccttcattctccccatgaaattcatccacctcgaaggtatgttttccggatttaacaagataacggattttgtcgataacaccgggttcgcagagctgtagcaattcttccgcttcgtttaaagtaatttctttttcccattcataacggctgattccggagtgattccctttccccttgatcgtgagaaatccctgctctcctttgattcgtactcggacagtacgttccggtacggaagagaggtatccttgtgtgatgcggatcgattggtatgcttccggtttgaaatctcctttcactaagaatttacgttcaatttcttgagccattttttaagtttagagtttagaatttaaagtttagagtttaaggcgggatattatagtat

SEQ ID NO: 279 - DNA, 6025 bp, Butyricimonas faecihominis
aagatgaaatgtcctgcaatattaataaatttgcgtgcaaactaaaataatgacagcataaaaaaaataatctccatattatctcggtgtgtgataggattggtctttttggcctttgctgcatacatggctttaatgaccccgtttgtacagacgaggttagtggattattttacccgtattttagaggaacggacgggaaccacgatttctatcggacgggtggaattccgcccgatagagtcattgattttaaatgatgtgtttgttcgggattgtcgtcaagatacgcttgtgttttgcgagcgactggtgatgaaggtggattccgtgagtttcgtgaaaagacgtttcacgattacggaggctgctttcgaaaaagccaagtttaatttatggatcgaacgtaggcaagatggaggggagagtcttacaaacgtggaacagctcattaattctttttcatcttccaaggtcgataccgtgcctcaaacctcttcggggtggaacgtgaatctgactcaggtaatattgaaagattgtcgtttccggtatatcgagagcgattatgaaccgacagattacgggattaactggacagacgtggagtgtcagaatctgaacgtgcgtgtttcaggtattgatttttcgaacaagcaatatcgggctaaagttgcgggacttcgtttcaaggaaaagtccggtttcgaggtgaccaatatgggaggggaagtcgtggcgagtgatgataatttgttgataacaaacacgtttatacagacagaacgaagtaaggtttatttggatacgttggagtataactgggttccggaacacgattactggcgtaattttaccacgaggatgcaacagcgttacgtgtttaccgattctagggtaagttttgatgatctgtcgtattttaacgggaagttattggggatgcataataccgttttcggtagcggggtggtctttaacacgataaataatctggaagggcgtgatttagagatttatttgggggataaaagcgtgctgcatggttcatttgcatcgcacgggttacctgcttttttcgaaacggatttcaatatcgatttcacggacacgaaggtgtctccaccggaattggaggctatttatatgccttggcttagaagtcattacgtgaaaataccggaaatcttgcataaatatgatgtctttacttttgacgggaattttcagggaaagattgaggactttgctgttaaggctcgtaccacgactcccggaatggtgggaagcgtgctttttaattgcgtgatggacagtatcggggatattcgttacgatggttggttcggtttaggacaggtgcaattcggatttctcacggaacaatcctttttgggtagagggtcatttttcgggaagtttgatggggtgttgggtgatacaatttctcgatttaatttgtcgagtaatgtacgtcgtttgcagttatatgataaggaaattcgggatattcgcttgacattgggaacggaaggtgaacacttgtatttactttcttccgtgaaaaatgatagtttgcaggctgatgttcttttggattatattatgggcgacacgttgagtttggcaaagactgaaggctatgtgaacgtgcgtcggtgggattcgtgggctccctctgtttttggggagagagagtctgttgaatttgattttagcggtactttgaagcaaagtgaggataattgctgggtggaattgctggtgccggggttgaagtacgagaacagtaggggaacgtggagtaccgattccttaaaattttccacgactatactgggagagtacagtttcactcaattgcagtcggatgtggcggacgtgacgatggaaggtttcttccattccttggaagtgacggatttgtggaatagttttttggtaagttatttgcccgactataagtatgctgttgacaaggctttgccggagggtacgagcctgatgctggatgtgcatttaaatgacattaatccttttttgaaggtggcttacccgcaactgaaattgtcccggggtgggaacttggcctgtgagtatcattatgccgatcgtcaagtagagttgtctttggaggcagatacaatttcctatggtgattttaaattacgtgattcccgaatgaaactgaatggggacgggataaacttgcactgcacgtattctgctgatgaattgagatatatgaatttcgggaagttgtataatgtgcggaacgtgatagaagtaaacacgaataacgtgagcgagcgtctgacttggtgtaattgggagagggagagttatagcgggtcgtttgcagctaacttgcgtttgttgaaatacggagaccgccatttaacccaagtgtttattcatccgagtacgtttgttatggcggatagtacatggcacgtggcacgttccatgattttgaaggaggacaataatattttcgtgaataattttgaaatcaaccggggcgaacagcgttttcgtttatggggacgggtgacggataatcctcgtgatgttctttctttggagtttcatgatttcagtttgaccgagtttaacaagatcctttttgataataaattacaacttttcggtcaggtaaatggtgaagtgaagattcgagatttgtataatgataatttgatatatgccaacgtgaatgtggatcagtggggagttaaccgggatacattaggggtactggatttgaattctcgttgggacgcgttgaatagtgctttggagataagcatggttaaccggatgaaggagagaaccccgatcggggtattcgggtattataagccttctacggatagtttgaacgtgaatctggagctttccaagatcgaggtgaattatctggccggttatttccccgatatgttgaaaggtggtgagggtacgatctcgggtaatctggttatgaaggggacaacacaaaaagcctcggttgacggttttctggaaatggattccgtggcgcttacggtagccggattgaacacggcgtttaaagtcgatgagcgtttacccgtgaagaataatcgggtcgtgctggataatttcaagatatatgatgccaagggacacgcgtcggtttgttcggggtattacgatctgaattcgaatttatacgacgtgtcgcttaaatttaataattttcgggtgttgaataccaaggcaaaccagaatgaagcattttacgggcaactgtatatcacgggacagacccggatgaataatttgtccggggacggggctttatccgtgaatctaaaaccggaagcgcattccgtactttacattccattgacttccgcgttgacggaggaagatgggagtttcctacattttataaataatcgtcaggcagatgagggacggcgtgcggaagaagagcgttcttcactggtttctaattttgatttgaatgctaatatcgagatcaataataatctggaggttcagattattttcgaccccacgatcggggatattttgaaaacggtgggaagtggtaatctgcgtttcggtttggggaaagataacgagttggatatgttcggggagtataagatcgagaaaggggattacttgttcacgttgagtaatttgattaataagaagttcgtgcttaaccccgggggaagtatcaggtggaatggctcgccgtatgatgccacaatcgacgtgagtgctatatataatttacgtacttctttgagtgatttgcttgccggaactacgacgacggtggataagacaacgaaagtgcctgttgagtgcgagttgaagttgggggagaatctgatgaacccgaacgtgcagttcggcattaatttcccttctctcgacgtgcagatgcgaagtctgatgcagagctttttttccagtcaggacgagattaataaacagatgttttctttgttgatattgaacaagttctatactccggattatattgataaggatgccgaactggaggaacggaatgcaggttaccagatgggagtgacgacagcgagtgagttgttgtcaaatcaactatctcgttggttatcgcagatcagtaataattttgatattggtttttcttaccgtccgggtgatcaggtgacgacaaacgagttcgagctggccttgtcgacccagatctggaataaccgggtgacgatttctgccaatggtaacatgatggagaaagcaaagactaattccaacacgtcaatcacgggtgattttgacgtggatgtgaaattaaatcgtcaggggacgctgcatctgaaggcctattcgcatacagacgagaagattacctataatgcgaccgagaccgtgcaaggtgtcggtgtctcttatcaagagacttttgataccttccgagagttattccgtaaatacttggctatttttaagcggaaaaaacaatcgacgtctcccgtgcaatcttctgataataagcagtaattttcatttccaatttttcatttttaattttccattctttgtcattgtttttttgattttttttcatcaaattgtgctcgttacgtgaaaacgtcgaacctaactaaaattatatcatgaaaaaaatgaccgaacaagagtacatggaccgcgaggcccaatacggtgctcacaattaccatccacttcccgtggtgttagaaaaaggagaaggtatttacgtgtgggatgttaacggaaagcgttatttcgatttcctgtcggcttattctgccgtgaatcaaggacactgccacccgaagattgtagaggcaatgacggagcaagccaaaaagttggctttgacttcccgggctttctataataacgtgctgggtgaatgggaagaatatatcaccaaatatttcgggtacgataaggtgctaccgatgaatagtggtgctgaggctgacgagactgctttgaaattatgccgtcgttggggatatgacgtgaagggaatccctgccgatcaagctaagattattgtttgtgataataatttccatgggcgtacgatcacgattgttacgctttctaacgatccttcttcttatgctggattcggacctttcactcccggattcgtgagaataccgtatgatgatattcctgctttggaagaggcgttgaaagacccgaacgtggccggattcctgttagaaccgattcaaggcgaggctggtgtttatgtaccgcatgaaggatatttgaaaaaagcgtatgatttgtgtaaggctcataacgtgttgtttatggctgacgaagtgcagaccggtattgcccgcacgggtagaatgctggcgtgtgatcacgagggggtgcgtccggacgttttgatcctaggtaaagctatttccggaggattaatgcctgtttcctgcgtgttggcagatgacgagatcatgttgaccattaagccgggagaacatggttcgacttacgggggaaatcccatcgcggccaaagtgtctatggctgctttacaggtaatcaaggatgagaaactggaagagaatgccgaaagattgggtaagattttccgggagagaatgaaagcgattaaatccgatatggtggaacttgtccgcggtaaaggtttgctgaatgcggtggtaattaccccgaagaatggtaaaacggcttgggatgtatgtttgaagttacgtgacaacggtttgttagctaaaccgactcacgagcatattattcgtttcgccccgcctttggttatcaatgaagagcaattgattgaagcgataggtatcatcgagaaaacattaaaagagttcgagtaggcggatttgaatttattattaggcatcttttcatgatcacgagtttgatcttggaaagatgcttttttatatagtccaacaatagcgtatattatttctttaaattgtgaaaagtttatttttccgcgtatatttgttttattaaatatccctcttatatg

SEQ ID NO: 280 - DNA, 6017 bp, Butyricimonas faecihominis
cttttggggtattaaatgttttttaaaatatgaggaatttgtcctaccagataaaagggtaaattaatgagcttgcatattttcccttttacagtttgtatcgtgtctattgagtagggttgagaccatacacgtattgcaatggtttgtggggaacgttccaaaaacgaatgtagagaacgtaaatgtgcgttatgaccggattttacttcgataggatagatcatggagtcttgaacccagatgaaatctacttctgcaggagattcgcttttgccccgcacccaaaaattacgtttttgactcactttgtctgttaatgttaataattcttgtgccacaatatgttctgcaatattccctcgccaagcatcgagaatatcttttgcacctaaaacttctttttgtacttgtgcagaatagtttaccaaacccgtatccaaccatattagtttgggcattcgtttttgttcaggaatggcgggaacttccgttgaggtcgtggggtaaacgagttcggtaagcatggctttttctaataaacggaaggcttcgccaatttctcgagcgttataatttgaaccggcaaagcgtcctaatgtaacggtttgtcctgccatgttccagccttcttttaataggaaacgtacaacatcaggcatttgtcgtccttgagtgtatttttccacatcgtctcgatagccttgtaatagtgtttcgtatattttatttaatgccaaaatatctctgcgttcagcatagatttgtacgacttcgggcattccaccaatgagcgtgtagagattaaataatcctaaaagacgatcatggaaggcgagcgaaacctctggacgctctaaaacaggaagcatggcttcttcacctgttgcccgtaggaactctcgaaatgaacatgggcgtagtgcgagatattctacccgtccgacggggaaagaaacatgaatatcaacgagattctccaatagagaaccagcggcaattacatgaatttccggtaattcttcataaaaataacgcaataaagatacagcttttgctgaattttgaatttcatcaataaatattaatatatttccagcttgcttgatctttccacagtgagcaaagataaagggaagtagatctttgagaggaagggataattcaaaaatgtcttgagcttcttttttttcgagatttaagtagaggtagttatcaaactcctttccaaattcgttgattaacgttgttttgcctacttgtctagcacctcgtagtactaaaggtttacgatgagtgtcatttttccattgctttagagaagctaatatatctcgttcaaacatagttttattatatattgatttccagttacaaatatatcaaattgtttcaaaacctaagcaagttgaccttatttttgttccaaaacctaagcaagttgaccttatttttgtcgcaaaacctaggcaagttgattttgtattgtaccagcttgtaccagcatttacccgagggtgtaatttttcaacaatctaggaaagaatcaaaatttttgtgtaaattcgcctaaataatcttattcttcatgcatggaagtttgtcagaatgatgattcagcctttttgttaacgcgttttaatcaacgtgacacttcggcttttgccatgatttacacgaggtttttcacggaactccatgtttatgctaatcgtttgtacgcaaacacgttcgagtctgccgaggatgcggtgcaagaggcattttgttatttgtgggagcggcatgatgttgtttttgatagtttgatgaagataaaagcgtttttgtttgttgcaataaagaataggtacaagaatcacatgagtcatttgggtgtggagcagaaatacagggatgtactggagcgagaaacctctttcgttgaggacatcttggagagtgaactggcaacttccctgttggaatacgtagagcgtattccggatccggaggggcaggtaatgaaactttacctgacaggattggatgcagaggcaattgccgataatatgcagttgagcatacgaacggtgtacaacgtgaaatcgagggctgtcgggatgttgaaaaaattcttttctttgagtaatgaataatattttgaagatgaaggtattttacggaatgttatgtttcctgtttgctttctccttgaccgtgaaggcacaggattcggtgagggtggcgcttgtacaggcgcacttgatatggggggatgtgaagtccaatctatgggcttttgataagcgggtgcctttgtgtaagggtgccgatgtgattgtatttccggagcttttcacttccgggtgtgagatgaagaaacgggataaagaagaggcaatgcgttcgaaagatgaggtggcttcttattacccgacagtgatcaagcggatgaagaaatgggcgaagcgctccggggcattggtgatcgcttccacgatttacaaggaggaagggaaatattataaccggttactggctgtttatccggatgggaaatacgaatattacgacaagcataattgttttaaaaagggcagtttctcgcccggagaccgtcatctgacactggaatggaaggggatacgtttctcaacttatatctgttatgatttgcgctttccggagtggagtaggaatcagggcgaatatgatgttgccatttacatcgcgaactggccggaattccggcaagatgattggaatcgacttttgcgggaacgagctattgaaaacgaggcgtacgttgtggccgttaattgtgccgggacagacttaacaggacttgtttaccggggagagagttgcgtgatcgctcccgacggagaagtaagggcgagatgcagggattattgggatgatgtcgtggttcataaagtttgtaaggttcataaggttataaagtagcttaaggggcatacaaataaagcgtccttgggggacgcttactttataaactttacagaccttacaaactttatgaactaatccaatttcagcacggcaaggaatgctttttgcgggacctcaacattaccgatttgtttcattcgtttctttccttttttctgtttttccagtagtttacgtttacgggaaatatcaccaccgtaacattttgcggttacatccttgcgaacggctttgatggtttcgcgggaaataatcttcgcgccgatggcagcttggattgcaatgtcgaattgctgacggggaatcagttcttttaatttctcgcaaatgcgtttcccgaaagaataagcgttatcaaagtggattaaagcagagagggcatccacggattcgccattcagcagtatatccaatttcacaaggttagcccgacgataaccgatctggaaatagtcaaaagaggcgtaacctttcgtgatacttttcaatttgtcgtagaagtcaaacacgatttcggccagtggcatctcgtagttcaactcgatccggtttcctgtcaggtagtgttgctttatcagtacgcctcgcttgccgagacagagggtcatgatctgaccgatgtagtcggtaggcgtgatgatctgtgcttttatgtaaggttcctcgatatagtccagtaccgtgggggagggcatatcggaggggttgtgcatttcgaagacttcgcctttcgtggtgtgggcgatatacataacgttgggaacggtggtgatcacgttcatgtcgaattcccggtccagacgttcctgcacgatttccatgtgtagcattccgaggaacccgcagcggaatccaaatccaagggcggctgaagattccggttcgaaggttagggatgcatcgtttagctgtaatttctcgatggaggtgcgcaggtcctcgtaatcctccgaatcaattgggtagattccagcaaagaccatgggttttacttcttcgaatccctcgatggcagtggtgcatggacgttccacgtgcgtgatcgtatccccgacttttacctcggatgaagttttaataccggaaataatgtatcccacgtctcccgttttcagttcgttgcggggttcttgttctaggcgtaatactccaatttcatctgcatcgtattccttgcccgtactcacgaatttcacgatgtcaccttttttcagactaccgttcatgatacggcaataggtgatgattccgcggaaagagttaaattccgagtcgaacaccaaggcctgaagtggcgcgttgggatcgcccgtgggtgcgggaattcgttctacaacggcttccagtattttatccacgcccagtccggtttttccactggcttcaataatatcatcccggtcacatccgatcagttcttcaatctggtccttcacttcctcgggcatggcattgggcatatccatcttgttcaaaacgggaatgatttccaagttattgtcaatggcaagataaaggttcgagatggtttgtgcctgaataccttgcgtggcatcgacaatcagtagcgcaccctcgcaggcagcaatggaacgcgatacctcgtacgagaagtccacgtgtcccggggtgtctatcaagtttagaacatatttctctcccttgtaatgataatccatctgtatggcgtggctcttgatggtgatgcctcgctctcgttccagatccatatcgtcaagcacttgtgcttgtaaatctttccctactacagttccggtcgtttccagtaaacggtcggcaagtgtactcttaccgtggtcaatatgtgcgattatacagaaattcctaatgttcttcatctacgaaattttagatttaggctgcaaagataatgattttccggaattattcatttagtaaccacttccataggggaataatagggtaaaaaataacacctctcgtgcgaaaggcgttattttgttttatggataaaattggagtgtatacttgattatttcaacacgggttgcccgttgtaagtgactgattttagtaacgcttttgcattctttacagcctttcccgggagcggggagtagtttactttcgtggttaaggcttgggcctctgcgtccagcatccagttcaatagtttcaatgtctcttcggcttgagcttgatttctatcggcataggcttgctctttgtacaagatgatccatgtgaaacaactgatcgggtatgcatccggggcggccgagttggtgatcattgtacgggtatcggcgggcatatctcctttcgctgcggctgagatgctttccgtgtttggggtaataaagttaccggccgcatttctcatctgggcgaattggattttcatggcaaaagcatattcagaacccacgtaaccgatggaaccttccgtttgactgatgactccggcaacgcccgggttacctttagcagccatacctaccggccattttaatgattttccggttccgatcttctcggcccattccgggcttactttggtcatgtagtcactgaacacgaaagtggttccgctaccatctgaacgatagacaggactcatggctttgtcgggtaagttcacgccgggattgatggctgcaatacggctgtcgttccatttagtaattttgcccaagtaaatatcggcaataatgtccccggttagtttcaagttgtctactcccggaaggttgtacgccagtaccacggctcccatgcacgtcgggatgtgaactacggccgcgggcatttcgcccatttctttgtcggacagataggcgtcggagcctccgaaatccacgattttgtcttttagactacgaataccgccaccactaccgatgcccccgtaggtaatggaattacctgttttatcttgataggttttgaaggcaaggttatagaagggaagagggaaggttgcccctgctccggagatagatacttttttagcgggaccgttcacgtcatttgtcgcgttgctgctaaaaataacagctaatataagaactgtggttaaa

SEQ ID NO: 281 - DNA, 6011 bp, Butyricimonas faecihominis
ggtatggatgaaatgaatttttattaaacgttggtttaatgatatagaaggattaatgtagcctttagaaattcagagtccgcctctatggttgcaaattgtatgtgaaagaacatgttacattcccatcggcatcgcttaggcgatgccggggatatgttcaattcttttaaacaaaaatcctgtttacccgcaaaaattcggaatttcggctaacatttgaaattttccattcccggagatctccccgcaaaaatgcaagcacccgttcgtaatcgcgataaaacgagctgcaatggacagattatactggaatgcctgatcgaagacagcctgcgataacgccacggaaggcgctttacactccacgatcaagtaagggttcgcctgcctgtcataacacaccagatcaaaacgccttttcatgccgcacacttgaatctctttctcgacggcaatcaactgggcgggataacctttactctcgatcaaaaaatgaataaaatgctgcctcacccactcttccggggtcaaaacgacgtaccttttccgaatcatatcgaaaatccagatctgcccgttctgctttttcaccttgtactcgaaaggaggtaagttcaaacttttcacgcaatcactttttatcttttcttactttcaaaaaactactatcaccataactcaaaaaacggaaatcatgagccaaggcgtaatcatacactttgtgccaatcttccccgatagccgccgcaaccaataataataacgtactctgtggctgatggaaattagtaaacatcgccgtgatcacccggtacgaatagccgggaacaataataatcgtggtcttagccttcaacaattcgacatctcgttcatcgaaccaccccagcaaggcagtcatagactctttcaacgagtaaccggaaggcaagtcgtaagcctcccactgtcccagagaactgaaatcctcatctcccaaaattcgtttcacgcccatccagtaaaggctttccagcgtacggacggatgtcgttcccacggcaataatattttccgggtgagtacacagatgctccacgacttcccgccgaacagaaatatgttccgtgtgcatatcgtggcccccgatcgtctcgcttttcacgggacgaaacgtcccggcccccacgtgcaaggtcagctcctcgatcgttatccctttttcccgcaaggctttcaacacggggacgctgaaatgcaacccggccgtcggggctgccaccgatccttcatttttggaatacaccgtttgatagcgaatcttgtcatcctcttccgactcccggttcaagtatggtgggatcgggatacgtccgcaacactctagcacttcactgaaactggccggggcatcccaagtaaattccacgataacatcattctcttcccgaagtttccgcgtcgcggccaactgatactctttcccctcaaaccggtaatgacaaaaaatcgttccctctttccatttcttcaaatttccgaccatacatttccactcgcacttcccgtaagcggcaaagctctgcacgtagtccgagggccggtaaggttccaaacagaaaacctcgatcatggctcccgtgaccttctgaaaaagaatccgggcatagatcaccttcgtgttgttaaacaccaacatcttcccggcatcaagaatttccggcacctcgtaaaaatgcctctcgtcaatcctaccctcgtcataaatcaacaacttcgacgcctcccggttttccagtggaaacttggcaatccgttcgtcgggtaaatcatacgtgtaatcctcgatcctaatttcttttagcttttctaccatttcacgagaattttcgatcgctattttttttgtcattcggcaataatatcttacttttaaggctgcaaaagtaatgataaataacgaaaaaaaaggaaatgggatactccattctcaaatttcccaaccgacatattatgagcatgaaaacaaaaaaagatatagtggaggattggctgccccggtacacgggacgggccttggaagatttttcaaaacacatcatcctgactaactttgattactacctagatctgttcgctgaaaaatacaatgctcctatcattggcgagaataaaaatatgcccaacgtttcgcacgacgggatcaccatgattaacttcggaatgggtagcgccaacgccgccaccgttctagacttgctttccgccatagaaccagaggccgtgctatttatcgggaaatgcgggggactaaaagccaaacaccacgagggggactacatccttcctattgccgccattaaaggcgagggtacatccaacgactacatgccgaaagaagtcccttccctaccctctttcagcgttcagaaagcctgttcaaaaataatcacgaatcatgacaggcaatattacacgggagtggtgtataccaccaaccgacgagtatgggaattcgacgagaatttcaaagaatacttgataaaaacacgggcgctggccgtggacatggaaaccgccacgattttcaccgtcgggttcgccaaccgtattccgacgggagctttattgctaatatcagacaggcccatgatttccgacggcataaaaacgtctgaatcagacaaaatcgtcacgcaaaatttcgtccggcaacatctcgatattggcattgaaaccatgcaatacatcaaggataaaaattattccatgaggcatctcattttttaaatattatgtcgtattttcgttgtcaaattaattacatatgctgaagggactattttacatcttcttagggatcattcttgcctgttcatgtgacagcaaaagtaaaaaacaggatgggcaggaagtaaataccccaacgagcgtgaatgattccaatgccattgccaaaattgaattccctcaaaaatcattcaactttggtgacctgcaagaaggagaaatcgtcacgcacacgttccgtttcaaaaacacggggaccaaaagtcttgttattctcaacgtggaggctagttgtggctgcaccacgcccaagtatgacaaaaaaccgatcccgccgggaggagaaggaaaaatcgaggttgaatttaactcttcgggcagatatggtaaacaatacaaagtaattaatatctttgcaaacgttccggaaaaagtgattgaactaaaaataatcgcaaatatcaagaataaataaaaaagtaaatttatgaacacaattttcatgttaacattacaacaaactgctacacaaggtaacgctttcatgcaattcttaccccttattcttattgtcgttgtattctggttcttcatgatcagaccccagatgaaaagacaaaaagaattgaaaaaataccgggatgaattgaaaaaaggcgacaaaatcatgacaaccgggggaatcttcggaaaaattgtcgagatcaacgactttaccgttatcattgaagtagaaagtcaagccagattaaaagtaagcaaggaagccatcgtgaaagacatgacggacgttccggctagcaaataattttagttacaggttacaagttcgccagttacaagtttcattctttgtaacctgcaacttgtaacctgcaacttgtaactcttccagtatatgcgtggtcttatcggtaaaatactaggctatttcggtgcatcccatgaattacacatcaaacgtaatgtagtcacgtacggggtatgcgttatcatcgcgactgtgctatggtttttaaacgcattgaataaagaatataccacggaaatcacctacccgataaaatacatggatctccccaaaggaaagctactcgtttccgaaccacccaaagagatgacgttggctataaaggcccacggtttcgccttgctgcgttacagcatcagcacctcttttctaccgatcgtgcttaacgtgaactcgttactggacaaaaaagaccagttggaatacacggtaaacacgtcagagataaaagagcggatcagcgcccagttgaacacggacatccagctaatctccattaaaccggaaagtatcacatttcagttctcccggttcgaaagtaaaagagttccggtaattccccgggtcgattacacgttgaaacggcagtacatgttgaaaaacgatatttccgttacccccgattacgtggacatcagtggaccggcctccattcttgacacgctaaaagcggtgtacacggaaccgatctctttaaaaaacctctcgaaagacgtgaccaaaaccgtatcgtttgaggaaatctacggaacccagatcaatgaaaatgacgctaaagtcaaggtcgaagtggaacgattcacggaatctaaaaaaacagtacccctcgtcgttaaaaatctcccggactcactcttgatccgcctgttccctcacgccattgacgtgacatttgacgtgggattaagccgctatgaagtagtttccgacaccagtttctctttctacgtggattacaaccaaatcaagaacaacccggcatccttgaaaatccaaatcgagcgctctccccgtcacataaaagacttggtattcaccccggaaaccgtcgagtatcttatcgaaaagaaaaaataatcccatgctaaaaattggtttgacaggaggcatcggaagtggaaaatccacgatagctaaaattatcgagacattggggtaccccgtgtatattagtgactccaaggcatccgagctaatcaaccgggatgaagaaatcaagaaacatttaaccgagctattcggcaaagacatttaccagcccgacgggtatctggataaaaaacggctggcaacaatcatattcaatgataaagaggcgatcaagcaagtaaatggcattgttcatcctgccgtaacacgggatttcatgacgtggtgttcggcacaacgacgcccgtttctattcttcgaatcggccattctgttcgaagcaaaactcgaacacctttttgattacattattctaatctcgacagacttggaaacccgcgtggaacgggtgatctcaagagacgctaccacccgggagaaagtgattgaacgtatcaacaatcaaatgcccgatgaaataaaacaatcgaaatcggatttcgtaatttacaacaataatgatgacaaggtgataaaacaaatcctttccatcattcatcaattaaacaatattcattcaaaacaagcataatatggcaaaatacggaaaatggatcggagctggtttaggttttgtcatgggaggtcccatcggagccttgttcggttacttcatcggttccacgttcgacacggcaacagttgtaacatccggcccggcgaacgatccgggtacccgccccacgggaagaggtgactttttgctgagccttgtcgtcttggcaacagccttgatgaaagccgacgggaaagtgacccgcaatgaactggactacgtgaaaaagttcttccgggataatttcgggctggaaggagaacgagaggccttgacgattatcaaggacctattgaacaaaaacatcgaggtggatcaagtttgcacccagatccgcatgaacatgaacgtctattcccgtacacaattattatatttcctgttcggactggccaaggccgacggaacggtatgtaaacacgaaatttccctgctggataaaatagctaatttactgggaattgattcaaccacgtaccagtcaatcaaagccatgtactatgacgatttggattctgcttacagcatcctaggcatcacgtcctccgctaccgacgaggaagtgaaaaaagcttaccggaaaatggctatcgaaaaccacccggacaaagtcgggtacatgggagaagatattcgcaaggctgccgagaagaaattcatggccatcaacgaggcttacgagaaaatcaaaaaacaacggggcatcaattagtcgggtagagt

SEQ ID NO: 282 - DNA, 5997 bp, Butyricimonas faecihominis
gtaatagtacattgtactcatcctccgacaactcttttccaagtaatgggaaaataactacctgcttcgacacactcggatagaactttgtgataacatttcgtgagtgaatactatcaaacttttgtagaggactatcaataaatacagggaattctattccagactcttcaaccaaagcgttaagaatagccgttgcatacaactgctgctctccctttgataatttctccttactaataatctctccggccttatccaaaagctctatctcaataatatcattttgtaggtcaatacgcacactgtgtataaaatccgccttgtgcatcaacacatctatgccagccataatcttcttctcaagagaaaacttgcgcttagctcttaactcaaacaagaatgtcgttaactcactgataagtcgctccgctattaaatccttctctttatcagccttatcaacgcgaacatgtttcgcaacttctgacaactgttttttaaggactttaatatccttgtttaatgttcctatttgttccgagagatggcgggtttggatatctaactgagccaataactcatcaacttctgctttacgcattcgtatctccttgatatcggcatttccatcatcatactctgcctcaacaatctttcgctgagtttttgccatgaatagagcattgttctttatatcttttactagctgcttgaataaggtgttgaaagagtatctgatattgtcaaacaaagcctgaaactcatttgattcactatcattaaagtcaactaacaccttaatagctgccgcatcttccactgatgtttcaacgatattatttgcaaaggcgtctgcgataatcctctcaacagcttgcttttgaagttctgtaagcttaagttcagatactccttctgtaatttgagtctgtgttaattgaagggcagcatttatggcagcacgactggcaacagtcgttttaattttcttctcggcaataacctgcgtcattaggtctgtgaacaatttaccagaaatagcaaatggagcaacatctaacatctcgcgtaattgactctttaatttagagtccttctctttcaatgcaataagcaactctttttgtttcttgaggtcctctacactaatagcattaccttcacgaataagtcgctcttgcaactgaactgcctctgctctatactgctgaatctgattatcaactctttctcgttcctcttcttttgttctaatttgcgcctccaaattatcaactccagcttgaagcctatccaatttagctttacttgctgtagagcctgcactctttcggaatttgagacgaagattctcaagatttctcttgatgtcttcatacttctttatacctaaaacctcgctataagccgtactcaatcgacgtttttcatcaattgattttacttctgcaaggtttacaatcttttcagcatcaaagaaaaagaactttgcaatatcctttgaaagaataaagtcattgataaagatgtcgtagccaacgtcttttgctaattcatttacctgtccatcaattaacacctcaacgaattcagtatctaagaagtagtcataggttcgtcgaattgtaattgtacgacaagggatagatggaataaatatatccgaaatacttatctcaacataatactgcgcatcattcttaatatattcgctttccgaagaataaccgtgctttataatccgttttcgcacttcagggcttgcttcatatgtatttacaacacttgctaactctttatgcaagctttggcgggcatagttcttatatccttgagcatcattgatatcgcgtctaaacttttcatcaacatcgaccattaattttccatatagacaccatacgagggatgtgagaaatgtagttttaccaaaaccattgttgccggcgacaagaaagatattcttggcatcctgcttaaaagaggttttgttatgccccttgtatgctctgtaattatgtaatattattgactctataaacattgcttactgctggttgaggtagttatctaatcgtttctcaatatcgccttgtaggccattattattcatcaaaatagtcttgctcttttgaagcgataccaaatcatttatcaagtggtaatcttcaggatgttctgcacataccttttcaaggattaatcgctcttggtactgcatattttcaagaggcatatttcgtttatacacctcattgtaaatatctgttacttttggtgcaaagaatccatctcgataccagttaatttgaatcgcaacaagttcttgatttgaaatcaactccatatgaggctttattttctgcatatcgcgctgcaattccaataatttacagagcatctcgcagcgatactcaaaagtgtaattaccttgattatgaccatcagcatcttgagcagcttgaccatttctgcgggttgcatacctgttttctgaaatatttcgccctgcaaccatttcgtctcgatattttaataaaggagccatccattgattgccattgttaataagggccatcattgacttgtcttcctttactacggtgcaaacccaacaaccaaatcgactctgcccacatgaaggctgtgtcttatccgtaattacagtaggacactcataatcatctgctgtggcatcagcatatatttggaacaacttcttattgtcatagccccaaggtgatggctcattgttgagtatataccatacctcttccagatataaatctttaattggaggatatgtgtatgtattggggttcaatggatgcttggttaaacgttttcccttgatttcgtgacgacgaatcgatttcgcacgagtagcactctcggaaagacgagtaccaataagaacaatagcctctcccatagcatctaccttatcaagaatgaactgcgtagtaggcttaatctttaatcgatcagtacaccatctaaaggtattatttggaacaggatatcccttacctaggaagctaatccagaaactatcctctaattttggcactgttatttggacattgataggtagtttttgttcaatagcagcaatacggatacaatccaatacctcaacgatatagtctgtaataataggattttccactagggtgtcattatttacaacatacacctgtcgaacaagagccgtatcgcctaactcttctcgtatagatagcaaggctctccacactaatgttagtacaaccgtgctatcttttcctccactaaaaccgataatccaaggtatattgttatctttttcaagatattgttccttaatatcatcaattatatattcaatgcgtttcgacattttatattactctttctgtgattttaatagtacacgaacatcaacatctaacaagatcgcaatttcttgtaattgagcgattgatggttgagatttattagaacaccaccttgaaatggtattctctgatttccccatttgttcagctaaccatctatttgtccttcgtttttcagcaagagcaactttaattctattcatcactatttgttgattattcgacattataattcaatttataaccatgattcatacaaaaatacctctatttttcagtttgcacaagatttacatcctttttcttaaaatctttttgcaaagattatagactttctcattacgagtgaaaactcaatttttctaacacacactattatttaggatatcaatttagtcattatataagacttgaatactggtgatgtagccgcatcataatacattacaatcttccaatgatttcttccatacgcaactgcatcagcatccgttttcctgattaatttgcttgcggctttatcgtagtcagcttcacaagttatttcttcgaacttaaagtaattttcaatattggacaattcttgtacagctttagtataatacctgtctatcaaatgataacggtcgaaatgtctttttataagtgcatatagatttctatcaattccatttctgttatctaaataatattcaaactgaacacctcccgttatagcagtgatatgagcgaataggtatcgtgtatcgggcaaaatgtcagtataaaaattaatggtgaagatttcgccattcttatctaatatatcatcccccttaaatgtattacattcagaacatacaggtatcaaattaaagacatttactgcatattctgagtacacctccttgggaagaatgtgctccgtagtatttgcactatttatagtacaatacggacatacattattatatgtttgggggttattattgaaatgccatgatctaaaatcctttactaacttgcatccagacgaatacattcctaataaaggttgtttgatactagacaacacattagaagggcttagcgttcccaactttcgtttatccatagctcgctcataatatctgtatgcaatctcaattttgtgtttcattgcattaagttcaatggtgtcagcaccattcttatcctttctatccactgcttctgagaaaagctcatatggtgactttcctccagcatatcttttcatgttaatcatgattcaaatatttatcaattaacatataagaagtaagactcataggtaaatcaccattctgaagctcttgtagtacctgctccatggattctttaccttcgacagccttttctataagtcgcctgtaatacttatctcgttgaccattagagaaaatttcttcatttatagtagtcaggttctcacctaaactttcaaccctcatttgccttataacaggcattccatcaacatctcgttccattattaggacattacgagagagaagagattgaatcaccaaaggagaatgagttgccataatacaacaagacgagaatttttcacatacaagattcacaacatttataatctgtgtgatggcatttggatgaagatgaacttctggttcatctatcataattagacaatttgatcgcacattagcagtaatgtcgataatgaggttggtaagcatagtttgccctgaactcattttagcatagttatccttatagacattgtacttaaatatagagccgttttcaaacaaatcttctaacatctcgttgggcaagatattgcctagaaatttctttaagtttttacctctattcagagcattgatggtttctgcattacgttggtgtcttgctatcaattgttcaagagtcataaggccacccacgttattgtgcataccacaatactcaaagttgaaggatcgtgcatcaatatcataaaatctatcaaacatactataagatgctgctacaacttttgtaaacaaaggatgatgcggtgagaaacattctttccgttgattagcgattgacttagcaagattatataacaacgaggtcttacctacaccattttcaccgatgatggcaattactctattaaaattatcttcttgatttattctaccaaaatcaaactttatgttgaagtcataatctgaagaataagcaagcctagttttgtatgtaaaatttactctttcatcaggatcaaaaccagcaagtacataacgtcctaagtttaatgctgtatcagcattattatctcttaacaaagaatgcctaaatcctgaatcattttcaaaatcgtcagatatgcggctaaaaacagcggcatctttcattgcgtaaagaaatactattgcatcttcacccaatatttcttttattttagaataataagatgtttcctgacctaaagagcaataatctaaatctagggataaaaatgacttaggaataacatccagagttttggctacatttttcttgcatatcttcactttgcctacccttgaataggagccatcctccttaacataatctaaatagaatgatgttttatgtccataatcatcccatgttatac

SEQ ID NO: 283 - DNA, 5976 bp, Butyricimonas faecihominis
ccgcatagctatattttgtaaaaatatttgtatatttgacaaatcgttatatgaaaatctatcgtcgagatgacgaaagcgaaaaacgggacccccgggatttcatattctcccgggggatttacaaaaggaaagacaattatatacttaacctgaacttaagtttcgcgctacatatttttttcatgacgaaaagatggatttttatatattgatgcgcgattttccgggtggcattagtcacccggcctttttatatttttattgggagtagtttgtcatgattctactcatgtgtagagtcggagtacatggaattatccgtgggagaaatacacgaatttattcctccgattaaaaagatttttattaacttgcgacgttttattgtaatggtaacattttgatatgaacaaacgtgctatgcgatccggtttgatgttgtgcttttcccgttggaacaggaaagggtacgctattttcgcctcactgggacggaatgttcggatcgggcggctggctattcatatttgcgaaatgtcgttacagaaatcttcgaggaagggcgtgatcgtgatgctggcggaagtgttcgagcggttggagaggttgttcgaagggtacgtggagaaggtgaaacgagcggggtgcgagttattgccgactcgtatgggtatggaggatgtcttcattaattcttatcataatttgaaatttgaaggtattcctgtccttgggcagggtaccttttttattttttaacaggaaacagaaaatgaaagaagaaaatattatagaggaattaaagcgaaaggtggaagagggaggacaggttacccgggaagaggcgttggtattgtcacgggtggaagataagaaggctttgtacgaggcggccggggctattcgggatcgttttgccgggcggtattttgatacttgctcgatcgtgaacgcccgttcgggacgttgttccgagaattgtaagtggtgtgcgcagtcggccgtgttcaaaacgcacgtgcaggagtacgagctgattgacgaggagagctgcgtggagctggcccggttgaatgccaagtacggggtgaacaagttttcgttcgtcacgagcgggcgttccttgtcggataagaatattaacaagttgtgcgagtatgccgtcaagatcaagcaggagatgaagattaacctttgcgcttccatggggttactgacgagagagcaattgaaaagactgaaagatgcgggtataacccgctatcattgtaacttggaaacgtcccgccgttatttctctactctttgcacgtcccacacgatggacgagaagatcgagacgattcgccatgcgcttgagctggggatggaagtgtgttccgggggtatcatcggcatgggcgagacgatggaagatcgcatggacttggcgctgacggtacgggagttgggcgtgaaatctatcccgatgaacgtgctgaacccgattccgggtaccccgctggaaggagcagcgccacttacggacgaggaggtgttgacgacggtggcagttttccgtttcatcaatcccgatgcctttttgcgctttgccgggggacgggcgctgatcgctcatatcgaggaagatgccatccgggccgggattaactcggctatcgtgggtgatcttctgaccacgatcggctcgaaggtgatagaggatatggagaaggtgaaaagattaggctttacgacagaagataatctttaacttttagtttttaacttataacttttaactttataaagtgaacacggcagaattattgaagtttgacagggagcatttgtggcatccctatacgtcaacggttaacccacttccggtttatccggtgaagagggcggaaggtgtgtatattgaactggaggacgggacgcgtctgattgacgggatgtcctcgtggtggtgcgtggtacacgggtataatcacccggttattaatgccgctattgaagagcaattaaagagtatgtcacatgtcatgtttggcgggctaacacatcgccctgcagtagaactggccgagaaactggtggaactggcccccgatgggattgacaaggtattctattgtgattccggctcggtggccgtggaagtggcgatgaagatggccctacaatattggtacgctgccgggagagacgataaacgccattttctgacgatcacgaagggataccacggggatacgtggaatgccatgtccgtgtgtgatcccgtgacgggaatgcataatatattccggggatcactgcccatgcagtattttattcaccggccggaaacccgttacggggagccttgcctaccggagcatattgaagaactgaaacaaagcctgcggaataaccacaaccgtattgctgccgtgatactggaacctattgtgcagggtgccgggggaatgtggttttactcggcggattacttgcggcaggtgagtgagttatgtaacgattacgacgtgttgctgatttgtgacgagattgccacggggtttgggcgcacgggtaagatgtggggagtggatcatgcgggtatcgtgccagacatcatgtgtgtagggaaagcgattacgggcgggtatatgagttttgctgccacgatggcgacggagaatgtagctacccagatttgtgcgaaagatcccggtgtgttcatgcacggtccgacgttcatgggtaacccgttggcttgtgccgcggcaaatgcctcgctggatctgatcaagagttatgacttgacgaccatgatcgggcatattcaagaccagttggaaagagagcttgccccggctcgggaattcccgaacgtggcggacgtgcgggtgttgggcgctatcggcgtggtggagatgaaggaacccgtgaacatggggctgatccaagccgctttcgtgaaagagggcgtgtgggtgcgtccgttcggtaagctggtgtatgtcatgccgcctttcatcatccgtgattgggaactgcaaaggctgacatccgccttgttgcacgtgatttcgtatttgaagtaattgaaaatgcaaggatttgtaacctgtaacttgctaacttgtaactttgccgaaggcaaaacactatgaataaagaacgatatattaataaactgaacaagataaaggaatcggggaattaccgggtgctgcgagacgtgcagcataacggtttcctgatacattataatggacgggagatgctgaatctctcgtcgaacgattatttggggttggcgtcgaacccggtgttatacgaggattttcgtaaggagacggacgtgaaattgttgtcgtatagtgccgtgtcgtcccgcttgttatcggggaatcacgagtattataacttgttagagaatgatttgagcgatttgtacgggaaggaggccgccttggtgttaaattccggttatcatgcaaatatcggaatattacccgcattagcagggaaacgggacttgatcgtggcagataagctggtacacgccagtattatcgacggcttgcggttgagtgaggccgagatgttgcgttaccatcatttagattacgagcatttacgggaaatcttgtttaatcatcgggaggagtacgagaacgtgtttatcgtgacggagtcaatctttagcatggatggtgacgtggcagacttgcaggagttgtgtgatctgaagagggaatacgatacgttcctgtatgtggatgaggcgcacgctgtcggggttcggggtacgaacgggctgggatgttgcgaggagcagggctgcatggatgatattgattttatcgtgggtactttcgggaaggcatttgcatcttacggggctttcgtggtttgtgacgagatgtttcgggatttcttggtgaacacgcagcgcagtttgattttcaccacggcattgcctccggtaaacgtggcatggactcgttttatccttaaccggatgccggatttttactcttatcgtatgaaactgaccggtcttgccgaacgactgcgagtgacactggcaaaccggggattcgagacccggggagattctcatatcgtgcctttcctgtgtgggagtaacgagaatagtgtttatatgtccgagttgttccaagataatggtttttttgtgttgcctgtgagatacccgaccgtgccgaagaacgaggcacgtatccggttctcgttgaatgcagcgattccggaggaggattatgattgtttgatggagtttatagaaattagtctttaataattttagatttcatgattttagattttaaatttcatccgcacaggtctgatcctcaacttgaaactgataactcgtcaaaggcgatctcatgaaaaggaaatggattactaaagagggaaaccgggtgctcacgttatttttttgcggttggggtatggatgaacatactgtgcaacacgtgaggggtatgggtgatttgcttttgttctacgattaccgggatatttccggggaggatgcaccggaggttgaggggtacgagagtgtccgggtcgtggcttggtcgatgggagtgtgggcagcatcggtgttgttgagtcgttggaatattcctgtttcctgccgggtggctatcaacgggacagaacgcccggtggatgagcattatgggattcatcctaagatatatttgctgaccgaacggggtatgaccgaacaaggaagagacaagttctttgcccgtatgttttccgggaaggaagaaatggaacgtttcaaggaaaacaggccttgcagggctattgatgagcaaagggacgaattgcgacttatccgggagcagtcggcacgggaaatgcccgaaatgcactgggagcgggtttatgtttccgagggggatgttatcttcccggtggaaaatcaacgaaactggtgggggaatcgtgtcgagattattacgctaccggggggacattacccgttttacgtgttagataattgggaaaagatatggaaataaataaagaagaggtagaacagcgttttaggcggagtcgggtcagttacaatgacaatgcgcgagtgcagaaaatggtcgttgatcggatggttcccatgattttgtcatccgtggagcgtgtgccggagaagatattggagatcggttgcggtacgggtttgttgacctcgcaactgcaacgaacttttccgagtgacgggttgtacttgaatgatctggtggaggagttgtgttatcacgcggcgacggttaatcatgtgccgctgaagcattgtttcccgggggatgtggagaagttgtttttgccccttagttttgatctgattgcttctgcgtccacttttcagtggtttacgactccggaagaaacgttcaagaaattgtccaagcgattggagcaaaggggggtgttggtgttcagtacctttgggaaatttaacttgcgtgaaattcgactgaccacggggggcgggcttgattatcggaataaggaagaactggaaaagatgctgaaaccttactttgaaatcgaattgatagaggaagaatttcatatgcttgaatttgataccccgttagcggtactccaacatctgaaaaagacgggggtgaatgtttcgggtgatccgacaatctggacgaaaggacgggtggatgcctttatcaaggactataacgcccgctttgccattgacggaaaggttgccctaacttaccatccgctttattttgtgtgtaggaggaaatgaagctaaaagttaaaagctaaaaactaaaagtggagagtggaaagattcagtgattgccgattcaatgattaggtgattaaaaagagcgtcgcgtagagggtgggaatcactaaatcggaaatcactaaatcaagaaattagtaggatctaaaattattaaatctaaaatcaataaggtggtatat

SEQ ID NO: 284 - DNA, 5962 bp, Butyricimonas faecihominis
tcacttaattggaaatcattaaatctaatttagtatgaaggtttacacgaaaacaggagataaggggacgacggctttgatcgggggaacccgggtggcaaagaataacgtgaggttagaggcttacgggggtgttgacgagttgaacagtcatttggggatgattcggtcgtacccgattgatgaggagagcgtgaaacagttgatcgagattcaaaacgtgttgttcgtggtcggggcaaacttggcaacggacacggcggtgagtaatatgcagaagaaattgccttgcacggatgaggacgtggcttttttggagagggcgatagacaagatggatgaggagttgccgccactgcagtatttcgttttgccgggaggacggccggaggtatcggcttgtcatattgcccgtacggtttgccgtcgggtggaacgccggattattgatatgagcgaggaaatagaggtggaggatattatcgtgcggtatgtgaatcgcctttccgattatttgtttgtgctggggcgtaagctggcaaaggattgcgggctggaagaggtgaaatgggtgccgagaaattgaaaattgaaaatggagaattgaaaatgaaagaacctgtaacttgtaacttttcaatggcggaagtgttccggtttttggaagagttgagggagaataataaccgggagtggtttaatgcgcataaggagtggtatttggctgtaaaggccgggcatgaggatttcattaaccgggtgattccggcgttggctgtaacggaaccggaggtggacgggttgacggcgaaagattgtattttcagaatttaccgggatgtccggttttcgccgaacaaggagccttataagacgcatattggggcgtacatggtgaagggtggtaagcaaagtccccgggcgggatattacgtgcatatagaaccggggaattgtatgatcgggggtggaatttggtgtccggaaccatcgttgctgaaggctttgcggaaagacgtgtatgataatgtagatgagtttacgggaattatccgggatgcggaattccaaaaacattacgtgttggagggggagaagttgaaaaaggtgcctgcaccttttcctgccgattttccggaaggggatttgttgaaatacaagtcttacacggtatcgaattatgttcccgattcgtttttcgagggggaggacgtggttgaacggtgtgtggagcgacttttactgatgcagccttttaatcgttttttaaattacacggtggaggaaacgtggaggtgatcgccagaggcggttgcaggttgtttggttgcaagtttcaggttaaaaagaggggaatttgtggctgaattgctttgataataaggggaaaagtcgtatatttgtaatatggaaaaaataaaagaaaagatgccgcagcttgtaaaaaacgccacggttcgggaagagattttgcaaggaatgattacttcattccaactggaagggataaaaatttcccaagaaactgcttatactattttggaacgggtggatttgaaacttaaaacgtgtaagcgataatctgctccattctggagtagtcttttcgtgctacttgctgaacagcgataatatattcattaaaatcaatccttttgaagtttaagccggggtaaccttgttttcgtgccatgaggttggcgagaatacgggatgtcctgccgttgccttcccggaacgggtggatgaagagtaattcaccgtgtactttggcgatgtcttttatcagagcttgttggctggtgtagtgatcagggagttgggaaagaatttcttcttcgaaaatgcgcatactatctgggataaatcttccggccgggaacacgaatccgcctttggaaatgttgacggaacggaaacgcccggcaaaggagtagagttcttttagcgccgtgcggtggatgtcacagatgtatttgactgaaaattttgtcttgggcgttagcttttccgtgaacaggatttctgccatcaggaatccctcgaattccgcgttgtgaagtgtctcatcgtccgtgattccgagtaaattcgggagaatttctccctcttcgccattggtggtgtatctgttcatggccttgatttttaacaaagttatagaaatccgtcaattactccaaatttatttgtgatttatgatttatgatttatgctaaagccttatctttgtacattcggcaaggccgagttacaagttgacaggttgcaagttacaggttcttgggaatgataacgcacctgccgatgaatgtgtcgggattcaacttgtaacctgtaacttgtaaacttgtaactaaaaaaggatgaaagtattattattgggtagcggtggacgcgaacatgcgttggcgtggaaaataaatcagagtgaaagattaacaaagttatatgttgctccgggaaatgccgggacggcagagatagctgaaaatgtaaatatcaaggtaacggatttcgaggcgttggcaaatttcgtggagaataacgctatcgatatgctggttgtcggaccggaagatcctctggtggagggtattcgggattattttgaggcagacgctcgttttgcccgactgatgatcgtgggaccgggaaaagcgggtgctattctggaaggaagtaaggattttgcgaaggaatttatgttccgccaccatatcccgacagccggttatttgacggtgacgaaggataatcttgaaaaagggtttgcttttttggagacgttgaaaccgccttacgtgttgaaagcggacgggttggcagccgggaaaggcgtgttgattctggataatttggaagaggcgaagagggagttggaactgatgttgggaggaaagttcgggaaggccgggaatcaggtggtgatcgaggagtatttgaaaggtatagagctttccgtgttcgcgctgacggatgggagaagttataaaatattgggttctgccaaagactacaagcgtattggtgagggtgatatagggttgaacacgggtggtatgggggccgtttctccggtaccgtttgccaatgaagagttcaaccggaaggtggaagagcgggtggtgcgccccacgatcgagggattacaaaaagacgggattgactacaagggatttgtctttttcggcctaatgaatgttggtggtgatccttacgtgatcgagtataacgtgcgtatgggagacccggagacagaggtggtgatgccgagattgaaaacagatattttgtctcttttcgaggcgatggccaagggggagctggaacaggcggcgttcgaactggatgatcgtttctgtacgaccgtgatgcttgtttctcaggggtatcccggggattacgagaaaggaaaggagatcacgggtgtaccggacgtgaaggggagtatcgtgttccacgcggggacgaagttggcagacgggaaggtcgtgacgaacgggggacgcgtgattgctgtgagttcgttcgggaagactatgcgggaggctttggcccagtcttacgagaacgtggccaagattcatttcgacgggatgaatttcagaagagatattggttttgatttgtaaaaggatggatgatgagatttaacgccattttaaaaaccaagagagtttatatgctgtatttgctgccatttattttggcagcaattgcatttctacgttttactttcggaccggatgatttttccgtttgtccggatttgggcgttatttctattccagcttttcaggaacagggtggtttgtggtggaaggaaattggggtactggctttgttgtgcttgtcgtttctggtgttctttgttgccgatcggtataagtttttgtctcatatcacggttctcccggcggtggtttatgccttcttgtgtatcggagtgatctgtcgttacgggatgagtgattatttggtggcagccctatgtgtcgtgttggccgtggctcgtttgcagtcggccatcgtgaacacgcaatccaattcgccggtatttggtttcgggcttttttccacgttggcggttttgctttgcccgaaattgatcatgctgatcgtctgggcgatcatcgttttgcctttttcgggaagggcggcattgaaggatttggtggcgctgtttataggtatcttttccgcgttattcttcacggggtgttattatttcctaacggatcggttggcgactctaccggatgtgttcgtgcaggcgttgacgagcgggcaagtgttttggacgatcatgccggagaaagtggcggcttttgtcgtgatcggtgtgctgatcgtcgtgtccttgtataatgtcgtggtgaactacccgatggcgatcgtggcgcaacggcggggtatgttgtcgatgttgtcgatgttgcttttcgtggggagttcgttgttttttatcccgtttaattgtcacgggatcactttgattacagcgatcccgttatcttatatgtttactcaatactttatttcacatcggactcgctggctggggaacgtgttgttcctgttgttcatagcggcctgcgtgcttcttgttttgtagattaatagaacgtcagcatttccccgcgtacgtcgtcattgatcttgccatgatcgtacacgatttgcccgttcacgagcgtcatgctaacccggtaggtaaaagacatatcttcgagcggtgaccagccgcatttgtaaagtaaattttctttcttcacggtccacgggtgtttctcgaagatggcgatgtcagccttgtaaccttcccgcaggtagcctctttcttcgacatggaaaatgtcggcaggggcatgacacattttgtccacgatgttttcaagcgtgatctggcctttctccatgagttctagcatgacggtcagcgagtgttgtaccatcgggccaccgctggctgatttggtgtacactccggctttttcttccgggagatggggagcgtgatccgtggcgatgatgtccaaacggttgtcattcaaggcttgtaacagggcttgccgatcctcttcagttttgatggcaggattccacttgacgaggttgcctttggtgtggtaggcctgatcattgaaccaaagatggtgaacgcatacttccccggtgatgtgtttttgggtgcggggaccttgatccagtaattccaattcttctttcgtgcttagatgaagtatgtgcaggcggctgttgtgtttacgtgccagctcggctgctagcgaagagctggtgtaacaacactcccggttgcggatcaaaggatggcagaaaggaggaatgccttccccgtactgttgcttgtatagttccaagttacggtctatcgtgggcgaatcctcgcaatgggttgcgataagaatgggggattcggcaaatatcttttccaaggcctcccggctatccaccagcatattacccgtggaggaacccatgaaaattttaatgccgcaagtcgtgtgaggatcgacctttttaatctcgtcgatattgtcaacggtggcaccgaggtaaaacgagtagttgacagccgcgttctccttggcaatctgttgtttttcccgaagtaattcgttggttacggtgggaggtttcacgttaggcatatccatgaaagaggtcacgcccccggctgctgccgcccggctaccttcccggatgtctcctttgtgggtgagtccgggttcgcggaagtgtacttgatcgtcaatcactcccggtatgacgtatttccccgtggcatcgataactttgatgtccccgggaactgaatccaattcgccttctatgattttctcgatacgatcgttgtgaatcaggagatcccctttgaaggttctcccctcgtttatgatggttccgccttgaagtaatatacgcatagtaattttag

SEQ ID NO: 285 - DNA, 5908 bp, Butyricimonas faecihominis
atatatatgtaaaacgtatttctagaaataaaaagagtatacaagtcaaaatattatcatttatacatgcacaactattaaatacaaattagtatatttgtgtagctaaaccatcaattttgaattatgaaagaaattaaacaaatcatttttaagcctttcctattcatatgtataggcttaatgacactaactctcgttagtgcggctgcttatgatcctcctggagcaccaagagatgttgaagttactgactggtggaaagatggatgttcaataaaatttaaaccacctaaaaatgatggcgggtctccaatagttggttatcgtattggttataaatatacagatgaagctctttgggatgagcttcctagattaatactttcttatgaaattacagtgactaatcttattgagggtcgggaagttcagtttcgcgttagtgctgtaagtcaaaaggaggagaagggcctccatctgaacccactgaaccgatagtaattaaggatagatgacgaacaggtacacaataaaaagccaactttttagttggctttttatatattagtttttgacttttacccatttcacggcatcgaccacgattaattgggcgttaccttcaattagagtgcccgctccccggtcatccagcacaacccgggattctcctgccggcaagtagaacgttccaagagatacccactcgctgtcgttatccgatacttcccaaacgatttcctctttcccttccggggtataaaccgtgtagtagtttttcattcccggataatttgccgcataagtgtactcggtggtttgtatggattctataccggaacgataaaccgaaatctcgtacttgcccgcttccggaagaagtgctttccattctgctttactgtttccttttccagcctgtttcacgaatgcgctatgaatttcccgaccatatactccgtcacttataagcggtactccccaggaattttccttgagatcggtacaataataattataatcctcctgttttttttcggacaatcgttccgccagacgttttaaccgattaccggaagaatcaatcaaatgaaaaccttcgtcctcgttatctacgataatttccccgggtggaaagaaatggttcttgtcaagcaaggtaaccccggccgggggcagttcgcctttccataaaggtacatcgtgtttgctgaacgttatgcgttctggtactcgttttgaaaaattggtggacaacaagagcttggaaccgaatttctcgtgtgccacgatacgcttgtattcccccggcctgatcaagaaactctgagaattaacaatagcattcttacccgaggtcgttaattccaccaggagcaacgaaaccacgccatccacgttccctgtatttcccaccttaaaatcaaccgactggatttcttccgttcgtcgatacataatgtcctttattatcaatcgcgggatttcccggctcgtgtaccactcgtccacgaatgacctgatatcctggccgaaacgttcccggaatccgttcagaaacgtctcaaaatccatctcctggaaacgagaagcctgcgtaaattcctgcatataccccgataatgaatcccaagaagtaatagttgtcaagtaagccaataaatgagcgattttcatactaatcaccttgtcatgtcccgaacacccatcctggatcaatccctccaaccccaaccttgagatattattcaacgtggagggaaacaagaattgcctgtccacctccggagttaccatcttattgaataaccagcctactcccgggtatttagcagaagaaacaccccagtggaaatccgagaaaagtcgttccgcgtgtgtatttttgaaaaaattagaaatttcttgcgccagagaatatgcaacgtcatcagtatcttcctgggaaacatcaagccaatcccccgggttatcaagttcccctgtcattcgctcgctgaaaaagaccatttctggctgcacgttctccttaaacgaaaaactgtttaaaaaagagggtggtacctctacgatcttcaataacttgaaggggtacaagttaggcatctcgctctcgatagcatccctacactcgttttttaatttattcctgtattcttcagcgttagagtcgccagcgatcttctccatccacttgtcaaaatcttgcatgtaaaaatcgtttcccgggtaagtgtagaattctaccgtgattgaatctaccatcacggaacgtctctcgtaattaccaaaacaaagcgataaaccagttaatgcctgcaggttccggaatgttatcccgtcctgtcttttctctgggattccctgcgacaacaccatcaacccgtcaggatttttcacgtgcaacgtgtaaatcgtgaaatccacctctcggaatgtttccaagactgtagggggtatagccaccgggtaccagagtatttcaggaataagtaaggtataatcccttgacacgaacgccgtccgtttaccgtaccgctccacgtcgacctgccgttctggggtaaaatacgcctcgttatcaactcccacccggtaaatatcctcgtcaattttcccaccatataccatctccatgaccgtactatccccgggattcaactcccgttcaacgaccacggcttgtccatctcgtagaaaagatatatcccgtccactctccgccaacttgtggatttgcaagccaggattcaagtacaaaatcaatcgcttcattttttcccgcgttctattaaccaccgtcatccggctttgagcagagaagccattttcaaggggcatgtacgtgatatcatgagtcacaattcgagttctaggtatagactcgtaacgcgagaaaatttcccggtatgattcccggtttacttgacgttctcggaatatatccatataaatatatcctgcccataccgttaataccaggaacaagcaccccatgatggagaaaaacacgtttcgtccagattctctagataatcgcctcgagcaaggaacggccaagcacaacaatcctatccccagcgacaagaatattccccgttgcaacaaacacgtgctggaatgcatgaatcccacgattgtggaaaaagtttccgctagcaagctcccccgaaaatccaacaacccgtgaaatggctctgccaggtaagcgtacgacaagtaaaatattgtcaccagtaccaaccaacttaagaaaggataccggataaaacggctcaccagcaacgacaaccctaccacgaaaacaaatgtcggcaatacgtctctcgccaggaaagaaagatacacccacgggttcaccagtgaatccggtattaacaaattcgcgcacaaacaaaacatcatgaaaagaacatccacgattaaaaagggaaagaatatcccggcaaactctccccagaaaaacggaacgttgcctaatggacgaacggaaagcacctcccgacattccgcctttttccgctttcgggtaatatcacaaacaagaaatatcacgactaacgactggaaaagattcaagaaataagtcgccctcaccggaactgaagaggcaaacgcaacatcccaccacatcacctgactcatatcccaagggacaaaaaacatcagcatataaccgaatactcccactataaaaagataaaataaccagttccttgttaccagcttgccttcataaacgcaaaccgctttccatgtagataaacacatcatatcattaatattaacaatatccactaaaaagttttctacaacaaaaatatggagaatatctacatatcgctactagcaattcactttttgggcagatctcgactttcagcaaattttgttactattcctcccagtcatatcctcctttccctaatcctcccaacactttcctactattttacctaccataatatatggattcacgacactagctatttctgcataaccggccgcccggataaaagagtgtaagattttggccattataatgttcatggatttgtccggaagaaagcactaatttcggacaaaattagatttcacggtactatcaagagcgcacaactaagaactaataaaaaaagcaatatgcattttttgcataatgctttttctgataaaccgattaatctttatggtaaatttaatcctacttcgttttctttctttatcttcttaattcgatttctgtcccaataaagggacctccccctttcacaacccatcttttgtctttcctacgccatctatttcggacatattcgctatccgatagcccatctcctccttgatctgatgacaccaataactactaacccctgcctgttttgcgtaactctcgtaatcggaaacaacccaaatcgctttttctattatagcattggcacctctgatattataacgttcagccaattcaagaagatctcctcgaccgatatcgaaatttttgttgcctacggtcaggcaatgacgattcacgtatcccggagctgaaggatctatagaaaaggtaaaatcatatgctggggcaatatgccacactccatcatcatccatcaaaaagctgaagttcttgttatggtcgtccacgttacctcctaatacattcatcaccgtcaatagaaataattgcttaatctccgctggcaaaacaccaatcttataagctgtatcaaacaaactttcgtaactgttcgaagtaggattcattgcggccaaggtctgcacgtgaaccttttttccttcccgacgatcaaatcgctgtgtcagaaaatgggcagtccgttctccctccatcaggtacgacggcatcatatttagcccgacatctttcgccatgagataatagctgtactctatacgcgtggtaggtatgtccaaatgctcgtcaaacttgataattactggaatatatccgggaagtggggctgccacctgccccgaatagcattcaccagttttgaggttcaggttaataatagctttcggcctacgccctccagcagaagttccaaccttgaaaagactctcaaccaagaaatcaggccgtatttcagccttaaaatccgttgcctcgttcaatgtcaactgtgccaaccggtacagatcggcaatctcgaccttgaaaggttcttccatctcttccgcagccggaggcagaaattccaacgcccccataccacgccttccaatgtatgtcaaacggtcaagagccgaaagattccttgctttaatttgatggactttagcccattcgttgaacaccttatttccccaatggtcaggcaacgagtcagcgataaaggaaggtaatccgccgaaaatcttgctttcctcggcatacaccggtaacccgtttctcacggatgtaccatgtatcgaggctcgtaaaggagctatgtcatatccgctgtcgagaaaatcataatcaaaataaaaacatatcttttctatatatctttccttgtatgtaaccaaagatccaaccttttggccccacaggaacacgtcaagagtccgtatcattgctattcctccttactcttttgggtataaacttgttgatctgtttcaatgcaatcgggggcatcggaagttccgggagcaattccgacagacgttgttccatcccgacaacacgtaggagcgagatgaaattattgagcgtaatattccggttcacaccctgttcgagatggctaatggtagtcaagcttacacctgatttatccgccatctccttttggcttattcgtgccgcaagacggtattccttcaagcgctgacacaagagtgaaatgatgtcttgattggtagtataagagatttcattcatatagtaatatagcta

SEQ ID NO: 286 - DNA, 5904 bp, Butyricimonas faecihominis
ttatagtacgatattactaactaaattatgaacgtcatgggaggcgaaggacacgtatttgatatgattcgacgcacgaaacagaatcgaaaaatgcttcaggagcgtcgtgaccggatgaaagatctcgttgagaaaatgaacgagaaacctttaacggggtatccgaacaagttggcggaaggggaaatggaacaaatcgaaagagacataaaatcgagagaacatgacgaaaaggtgtattacacccgtttcatgtttgcttttctgggaattttgctattagttatgctcgtggcatggggaatgtggagaatgctgggagcgtgaaagtattggacgagatacactataaagcttgttacacttgtgattcgctggtaagtgttcgataagtgttcgataagtattcgacacgtgtcgtcaatttattcctgatttatccttgatatttactcatgctatcgacgagagagtgctgggacaccgatggcataaggggtaaatgaattcagggctgctcaatgtgaattggcagccccgaatcgttatttgctagaaaagtgttagtgtcacatggttgtaccgattaatcctttcgtggattgttctatgaaatcaaggatacattgaatttccggtccgatagtaatggtctccttgattctcagtagggcgttttcaacgcttgtcccacattgatacacttgacggtaggctttggctatatcgtcaatgatttcttccgtgagtttttgctctttacgcagaatgtaagcgttgattccgtaataggcaattgggttatgggcagcgacaatgtaagggggaacgtccttgttggcccggcacccgtcttttactagggcccaagtgccgatgcgacacccgtgtttcacgatcactccactacccagtatcacgttgtcatcgacaatgcaattccccgctgtcttggctgcatttcccagcacgcagttgttgccgagatgggtgtcgtgtgccagatgcacgctttccagcaggaagttcccattgccgacaatcgtgcaatctgttgtgttagttccccgattgatgatcaccttctcccggatcgtgttgttattcccgatttttaaaagggtatcttctcccttaaacttgaaatcttgcggagtggccccgataatggctccctgatagaccgtgttgtttgtacccatgcgtgtaccgctcagaatgctggcatacggcatgattgtgcagttatccccgatctcgacgttcttgtcgatataggcgaaaggatggatagttacatcctttcctatttttgcatcgggattaacgtaagctagtggacttatcatgataatttgtatttaaaggttattcggttcgtccaccacctagggcatgatacaagttaacaacggcttgtatgcgttggaactcgtcggatattccggagagttgggcgctgagcaaggactgttgtgccgtgagcacttctaggtaagtggatgttcctaaagttagtaattcttgcgtgtattccacggatttttctaaagaaaatatctgcttttcacgttgttctattttatcttgtgccgtttggtactgcaccaacgcgttgctaacttcacttcctgcgtttaatattgcctgttcaaaactaatcaaggcctcttcttgttgtgccttggcaactcttaaacgggccgtgagggctccccggttgaagatcggttgtgtcagtgatcccacagcagaggcaatcatcttacccgggttcgtgatgtatgacccggagctattggtccagccgagcgttccgctgattgatatttgcgggtagaatgccgaacgggcttggttcgtattgtaaaacgtgctggctaatgccatttcggccgacttcacgtccggacggttcgataataattgaacgggtataccgacatttaacagggtaggcagggattgatcttccagcttacctcgttcgatacgctgcggggcttgtttcagcaatagagaaagtgaattttccgcttcccggatgctttttttcaagtcgggaatagaggcggcaatcatgtagctgttagcctcgctttgcgcgatagcggcctcgtttaccatcccggcctctttcatcgctttcatggtttccacgcttttttgccataatacggctgtctcttccgtgatggccagttgcttgtccagcatgagcagcgtgtaatatgtgttggcaatcgtcgaaatgacttgtgtctgaacggcttgcttgtacgcctcgctttgtagtaaggtcgcttttgctccgcgtttggcattcgttaatttgccgaacaggtcaagttcccaactggaaacgaccgggagcgagtaaatctgcgtggcggcagctttgtcaaaactacttactgttccctgaggagataatcctagggaaggtaagtatgccaagcgggaggacattaatcctgcctctgcctctttcactttcaagatagcagtttgcaggtcactgttttgttccagtccctgacgaattaatttctgtaattgggggtccgtgaatacctcttcccagggtaaattacccatgttcgtggtatccgataccagtgtgtcatttacagaaaccgggtcccggtacaggccttccatatccacgtccgggcggttgtatttcttgtaaatgttacagctgcttaacagggcacccatgcatatcgtgtatataacaacttgtttcatctttctttattttgtgtattgttctatttcagattcaagttccgtgttatccgtgtcatgccattcgatcggtttaatcttctcttgcaggtattggaatgcaacgaacatggcaggtaccgtgaaaatctggcaaatcataccgattaacataccaccaattgctccggagcccaacgtgctgttaccgtttgcaccaacaccgctagcgaacatcatcggtagcaaaccgattaccatggccaaagaggtcatcaaaatcggacggagacgggcggaagcacccaatacggcggcagagacaatgctcattccggactgacgtctttcaagggcgaactcggtgatcaggatggcatttttcgccaatagaccgatcaacatgatcaaggcaatctgcatgtagatgttgttttcaacacccatgaactgtgcaaatatgaaactgcccattaacccgaagggtacggaaagtataacaaccaatggtagaatatagctttcgtactgggcgctcagtaacaggtacacgaacacgagacagagtacgaagattaacgcagttgtacttccgctggcactttgttcctcacgggtcataccggagaattcatatccgaaaccggtgggcaatgtttctgctgccacttcctcgatagctttgatggcttgtccggaactgtatccgtcggcaggagaaccgttcacgctaatggccgtgaacatgttgaaacgtttgatgttatccggaccgtataccttgcgtagcgtaacgaattgggtaatcggtgccatttcatttccgtttctaaccatgatttggtttaaggtttccgggttggcacggaaattggcatcagcctgaatcatgacacggtacaattttccgaaacggttaaagttagaggcgtatagacctccgtaatatccctgcaatgcagacagtaacacgttgggggatagtccggcttctttacacttggccacgtcaatgtctaccatgtattgcgggtaattcgggttaaatgaagttcgtgccgcggcgatttccggacgtgcatttagtttttccaaaaagttctgggtgatgttgaagaactcgttcaaatcaccgcctgttttgtcttgaaggttgaattcgaatccattcgtcaagctatatcccggaatcatcggtggggcgaacaatagtactcgtgcatccttgatcaatccttgggtttgcatgtataattgtccgatcacgctgtttacatcttggcctttgcttcgttcatcccacggtttcagacggcagataaacgtaccgtaagaactaccttgtccggcaatgaagctatacccggcaatttcagtccggtcggaaacagctggattgttggcgattagactgtccacctgtgccaaggcgatttgcgtggtttccaatgatgtggcaggtgggaggtcaacgatcacgaagaaggttcccgtgtcttcattaggtaccaatcccgtcggggttttctgcatcaggaatacaaggaccaccatgctggcaactactgtcacgaacgtgattaccttgtggttgatgaagaaattgatccctttcttgtatttgttcaatgtcacgtcgtaggcggcattgaaggcggcgtggaaccggttaatgagtccttttttcttgtgatcctcgctcttgtcgtgaggttttaagaaaatggcacacaatgcgggacttaatgtcaaagcgttgatggcggacaaaccgatggaaactgccattgtcaaaccgaactgacggtagaatgtaccggaagtaccggtgatgaagctcacggggatgaatacggccatcatcacgagggtgatggacacgatcgctccggaaatttcgctcatggcatcaatagacgctttaagcggggatttatacccttgatccagtttcgcgtgcacggcctcaaccaccacgatggcatcatcgaccacgattgcgatagccagcacgagggcgcaaagtgttagcaagttcatgctgaacccgatcaggtaaagcacaaagaacgtaccgatcaaagcaaccggaatcgctatggcgggaatcaacgtggaccggaagtcttgcaggaagataaatacaacgaggaacacaaggataaatgcttcgatcaaagttttcaacacctcgtggatagaggcgtacaggaagtcattggcactaagtaatatactgtattcaacaccgggagggaagtctttggaaacatcttccaacaatgcttcgatgtctttgatgatttgcgtggcattggaacccgctgtctggaagatcatactggtgactccggggtgaccgtttgcgttgttcgaataaccgtagcttaatccgcccagttcgatgcgggcaacgtctttcagccgtaaaatttctccgtcggaagtggcccggatgattatatcctcgaattcctctgtcgtctggagacgtcctttgtatttcatgatatactggaacgattgatcgccactttccccgaattgtccgggagcggcctcgatgttttgttctgccagtgcagccgtaatatcggaaggcattaacttgtattgtgccatcacgtcgggttttaaccagatacgcatggagtagtccgctccaaatgccatcacgtcacccacaccgggaacacgttggatttgcggaatcaagttaatcttcatgtagttttgaaggaacgtctgatcaaaccggtcatccgtgctgtaaacggtaaaacctagcaacatactggtttgacgcttgctggtgattactcccacttgggtaacttcggcaggcaggaatccttgcgctttggccacgcggttttgcacgtttaccgcggccatgtccgggtctgttccttgtttaaaatatacctcgatggaggcgtctcccgtgttggtagcggtagaagtcatgtacatcatgttttccacaccattgatttgctcttccaacggagctatcacgctgtttagcaccgtttccgcgtttgctccggtgtaagacgtgcttacccgaacggtagggggggcgatgtccgggtattgcgtgacggggatggaaaccaaccccagaatacccaagatcacgatgataatggaaatcaccgtggagagaac

SEQ ID NO: 287 - DNA, 5889 bp, Butyricimonas faecihominis
gcacaaggctgacgctttaactacccccttcggctcccccttgcacagggggagagacggacgcaagaaatcgtatcaatgtttcaatgtcgcgcatcctcccgctgtgtaagggggagttagagggggtagtcggaaatttaaaatctaaaatttaaaattagcgagttgttttgtgcgtggcatacacgctgtccagtagttggcgtccgagacaggggcgatagtgcgagccttcgtagtagttccggatgttatttgtgtatttgttgatgccggaaaagtcataaacgttttcagctccgaatatttctttcaattgcttcacgtccgccgggttcagacgtatttgtttgtattccgggctaatgatgattttgtacttcgtgtggtgattttggaatacttttgcgatttccgataacagtttgatttgtggtttcattaataccggagggtgaacccggtcttccccgggacggggacggaatctctttttatgtttttcccagtaatggtcaccgagttgttctatttcgtgttcccgcgggttccacaagtcgtttgtgacaacattgcggatgtttttgtcgggattcacgattcctctcatgtaattgcggtagcgtcggcatacccggtaatccatgtagggaaccagaaatttcgggttgaagaattcttgtgtgaactgggattggaatttgaatttattcatcccgctgacttccgggggaagtaggtgcatgtagcccgtggataactgatattctcgtaatagggtggcatcgacgatgagcagaacatttgcaatatgttcctcttccttgtcaagagccatcactttccggtgtacggcagccaatcgttcagccgtcccgtacaagcgtatagccttactcccgttgaggtatttttcccagtcggaggtcagaaatgccatcgtacaggaatttcctaggatgaaggaatcgaagtgcagggaatcccggtaattcttgtatgtcttccaaccgatgtaatcttcgttcaggaagatcggatcattgtcatattttttgtattcccgcagaaccttaaagggatcatcgtaaaaatagaacccagcgaggacaaagaagggaacgagaaaaagcacgcattttattataaatcctttgaaagttctcatggctaaaactgtaaataaatgaaatcttcagatccgaattgtccgaataggaacatgagtagtacgagcaggtagtagaccccccaacgtatgattctgtggcgttcgctcaaggcttgcaataggtcccgtttcgacataaagtattcgtataggaaaagcactacgacggcaaccccggcaacgatacattcttggtcggtcatccctagtcgcagttctttaatcgaggtgtgcaggttgaaggagaggtgactgatcatgtatccggcatcggatagcgagggcagacggaaaaatagcagggagaacgcaaagagcaggtaggtccggaggatagagtaaaccccgaacacgtgtttccccacgcttgtttccactttattccggtaggccacggtcaccatctcgtagctgatgataagtccttggattaacccgtatatcacatagttccaaccagccccgtgccacacgccgagtaacacgaaggttaccacaagagcgtagacgatgccccactgtccccaatatcgtttacttgccgcgatgggttggtaaaggtaatccctgacccagaaggagagggacatatgccagcggcgccaaaagtcggtgattgtctttgccacgaacggacggttaaaattgggtgacaggcgatagccgaacatcatggctccaccgatggccatatccgtgtaaccggagaaatcggcataaagctcgatcggatacaatagtccggcgagtaatagctgcgccccggaagcgtcttgcacggaggcaaatatactatccagatgcggagccagccggtcggcgatcaggacttttttcatcaaaccgatcatcatgagtttcagaccgtaggtaaccgtgtcgtagtcgaaacgtttctcgattttcaactgcgggagcatatcgaaggcccgttcgatcggtccggaaaggaatttcatgaaaaatagcatatagagcatgaagtccggtagtgagcgttcaggttcttcctcttcccagtagacatcaataagatagccgagtgcttggaaggtatagaacgagattcccaacgggaagaaaacagaggtgatggctcctttccagtccacgccgaaccaaccgagtagcacggcgatgttttccccgatgaaattgaggtacttgaatgccacgaggaacaggacgagaaagacgattcccccgacgaagactctccggcgtttgttttcctgttcctgcatcccgatccagcgcccccagtagaaggttattgccgcaatgagtgcggctatcagtaggtatgcgatgttgaaataaccgacaaagatgcaactggttagtaacaggaccggtttctggtagctgccttttaccgtgtaatataggattaggcaacaagtaaacagaatgacaaacggtagagagagaaacatcataggctacttctttttagcttggatggatgcgcacaggtcacccacgtgtttgaatttcagtatttcacgcaggccgaaacgaatgttgtaatgtttttcgatggccgtgatgaggcgcatattcgttagagaatcccagccgtccacgtcttttgccgtggtctcgggagttaacgtgatgttttcgttttttagaatgtcacgaaagatcgtgtccagttcgcgtaagatttcttcggtttccatagttttttatattaatgtcgttaatgctttccggtcaattttaccgctggtgtttaacggaaattcttccaaaaagtgaacttcggttggtaacatgtagacgggtaagtgttccttcagataatggagcaaggtttcccgttcatggggtgttgtcccgacgaacaagtgcaattggcatcccccgtcatcctctttcttgggaacgacgacggcattggtctcgttcgggaagaatttctttgtccggtattcgatctcgctgagttcaactcggaaaccctgcactttaacttggtagtctttacgtccgcgatagatgatgtccccgtccggatcgatagaacataggtcgcctgttttataatactcttttccgttgaactgggcgaatacctgtcgggacttttcctcgtcttgccagtagcctcgcatgacttgtttcccgcttacccataattctccttgttctccggtctgcacgggtattcccttctcgtccataatcatggtgtcgattccggtgaaggggtggccgatggcgatcatcccgttgtgttgtttgcaaccttcgggaggaatccggtaagccgtacaataaattgtggcttccgtgggaccgtacaggtttacgaactccgcgttgggggcgcaggccctgaaacgttggagaagatcggcatttgccgcttctgccgtcacgataaggtatttgagttttggaacgtgaatctcgtcaaagtaaggggacaggaattgtaatagggagggaggcatggccacgaaagtcagttcctcgtcttccatcaattcgtacactctcatgtattttaacttgtttgttcccaccgtgtaaatgctggctccgagggttaacgggtagagggtggacacgactgaaacgtcgaatgtcagttcgaacatttgcaacatccggtctgtcggcccaagttgccagcccagttgatggtaggcggcatagaatgcgttcaagtttttccggctgatcgggactcctttgggaaccccggtacttccggaggtgaaaatgatgtaggcattcttgtttgtatcctgcgtttgctctcctgttagatggtctatattttcatcccgtagctctaatgttgaaatacatttgatctcgttggagaggccttgctgcgtaccggatgcgtgaccgtataatacccgtttcattccggtggattccacaatggttctgttccgactgtccgggtagttgggatggaggattacgtaagttttcccggataacaaaacggccagaatagaggcgtacgtttcgatgcaatcttccgcgatgattccgataatgtcttccgggcaatcctgcacgaagggcataattccttgcactcgggcaaatacctcctgataggtgtaagaggtatcatcaattacaaaagccacatgatccgggtaatttctgtaaacccggacgatgtctttaatcatgtccatttccttcataaatcattcctttatacttgaggcccgctcccggcgtccattccgaaagtttatccatgttgcaaccgcctcaaatatcgtaacgctacaaaaataggcttttattagaaacatccaatgttattatacttttattatttcgagaagttttatctttgcgtgtaaatgctgaaagaaatgaaacagaaaccattcatcatgatcggggcggcaagttccggtagcgggaagacgacattcacgttaggtctgttgcgattgttgcggaaccggggaatgaaggtacaaccttttaagtgcgggccggattatattgatacgaaacatcatgccatggccgcaggagaggaatccgtgaatttggatacttacatggcatcggcggcacacgtgcgggagctgtacgcccggtacgggactgcgagtgatgtctgcgtgacggaaggggtgatggggttgtttgatgggtacgatgggatgaaggggagtagcgcggagattgccgagttaatcggtattcccgtcgtgttggtacttaacgcaaagtccacggcctataccgtggccccagtgttgtatggttttaaacacttctatccgggaatccgggttgtcggggtcgtgtttaacttcgtggcatcggtagcgcattatgcttatttgcagcaggcttgtgcggatgccggagtggaggcattggggtatatcccaaaggatgaaagtattgttatcccgtcccgtcatttgggattgtcgattgatgagacgttttgttttgatacgttcgcggatcgggtggcagaggtgattgacaaaaccgtgaatgtcgatcgtttactggaactttgtacggtggaattttccggtgaacagacgcaagatgtcgtttgtttcgggaacaggaagatcgctattgcccgggatgaggcttttaatttcatgtaccgggagaacgtggaggcattgaaacgagccggggaggtggtgttttttagtccgctgcgtgataaaagtcttccggaggccgatatggtctattttcccggagggtacccggaactacatttggcggagttggcagctaacgagggaatgagacagtctgtccggaagtattgtgaaaacggggggcgagtactggcagaatgtggtggaatgatgtatttgtgtgacacgattacagacggtgacgggaaggtttatcctatggcgggcgtgttgaaacaaggggcgacaatggagcagatgaaattgaaattgggttatcgggaagttcgtgtaaacggtcaacgtattcgggggcatgagtttcactattcccgaatattgcctacgaatgagaaaatacctgtgattggcacgatatataatgccaaggatatggtggttgatactccggtatatacctataaaaacgtgttggcaagttatattcatttttactggggagagtgtggtattgatcattttttaatgttaatgagtcaaaaatgacaaaatgtcttaagctatatttttaatgacataattttggag

SEQ ID NO: 288 - DNA, 5879 bp, Butyricimonas faecihominis
catcattaataacaaatgtgctgaagaccaaccaaaatgcggagcattcaaggtctctccggtcaaggggttataattttcatgaacaggctgatcccccaacaacccctggcaattatttaatatttttaatgtcaattcattggcctctttatcatacccgtaatttctcaacccccgaataccgaaatacgcctgatccaaccaaaccggtcccctccaatagcctcgttccggttctaaacggggatgacttagatccaaggttcccaaaggcacaaaagaattgaaccgattcacatccatcataacattcctcacccgatccgcttgtttttgattggccactccggcccaaagcggtaaccagccctccggtccgtaaactggaataaaagcgtgtgattttaatcgaacatcaaagaaatatccattctcatcatcgtacatgatttgtcgaatcctgtcagccagaatacccgcatctttttccaaccggttggcaagctcctcccgttttagcaagcgggcaaagcgggcaagcgtcctcttttcatcatacaaataagtattcaaatccacactttcctgactcattgaccaagctttcggcaactcccccttcaacatctccgtactatcgaaacgcacggcattatccatcccactttcccaagccgcagcctgcaaagtcccgtccgttgccccgtactcacacagtccgttctgatcaacatcccgataagcataccaccaattatgatatctcaacaaccgatcaaacatctcctcgacaaaggccaaatccccgtccgcatcataaatttcctccacggcccatgaagccaaagggggtttcgtgtcccgcaaattattaatatactttatccggctgacaaaatccggaatcataccttcttccgtttggtaatcaaacaaagcccgaatatgatctttagccaactccggttcccaacgtccgatcgccgcggcaattttccaagaatcccatgaccagaatcccgtgctgaatccccaataggaaggatagcctccatcatgcaataaatcatgtgccgcactccgccaattcgccatcagcgtcatcaaacacttgactgctactcttctgtatttcaaatcagtaaataattccgacttattctcaaacagcttttcaatatagcgctcccatcgttgtgctgccatttcaaagaatggttcactctcctcgaaaggatttccctccagtaccggatgcttcacatgttctggttcgtcattaaaataggcagaataaacaaacatatcctcccgttcctcacctcgcccgaattttcgtacctccgtttcaaaacggtactttccatccaaaactaccgcatgacagccttcacccgcctctatttcaaaacaacatttcgttgcgggaaactccaaatacaccgtccgtccgtcaataacctgaccttggaaatattgagtaaaaaagctcccctcataaataatcttaacctctttaggacctcccgtgttgcggacccgagtccgcaacaaagaaatccgattgtttacaaaaacaatctcctgtgtcaaggttagagtctcccaggtaaaggactgaatcatccgacccgggaaataacttttttcaacaatagcattcgtaacttcctgtaatactccgtcaacaaccactgatgcaaccgcagtataagagcccacggcataattggatgccatagacatgggaccggaaaaacctcctgccattccgacactatccggaataaaggcaaatccatgccatgcccccaaatcggagaaaagagaaactccttctctgatgccttgaggccagttagatatattcagtacattacgatagtcagcctgtacattaaaaaacgattgtcccgcacacccgcacagaaggattacaaaaagccatatatatttcatactattccgctgctttatgaataatctgttttaccgtaccaacattttgatccatcttcataaccaaacgtcccgcctcatccgacgcaaatccctctgaattaatcttcaagaggtaaacttcaccattagccaatccaacacacaaatattcattagcatagaactcatcctccatcgccttaatttctgccggaaaactataataccgttccggcacaatctcaccctccgcatcttttccaaaataatacaaaacattaccggaagcaatgaaagcatacggacaaccaaatccccggcccctaccattatccggaatcaacaataaaatattatcattcatcatatcccccttaaattcccgttgagactctgccacaatatcttcagggtcatctgttaataacatttgtcccacgtaagttccatccgcacgtttgatgatattatacaacccgccagccggaatataatagtcattccaccaatacccgcttgttgctattaactcattattacccaagttatccatgggaataaatccattcggataaccagcacatttcggctcaccaatagttccatagctggaagccccccggatatacaagaatcgttttctctctttttcatacacgaaaacgtacccattttctgtattcatatcatacacgaaacgatctgcattcaattgatgagcaacctcttcacccacaacatcaggttccatatacaccatcggatattgcgaaaaatatcccgtatggaaagcttctgaactaaaattcttacgcccgaatacccgtccgtcctcggccagcaaaaaactataccaatcatcaaagaatacttgcttaggtctcacgttctccgggatcacctgaaattctttcgacaattccaaagatttttccaaattcgcaccatctaagtcaagacatttataaaaatcatcctgcagtagcataatatgttcgtctgtctgatttcctaaatcatgcagatgaatctgtacaggtttcccatccaaagaaacgccttcaataccttcataaatatcatagatacaccgatcccactcccctttcactctttttaaaaaacttaatgatgacactccatttttttctgataaaatcaaaaaaccatcggaataaagtgaactaacccttaccatcgtctgggtcataaaagttaatccactcaatgtatcagttacctgcaacacccatttcatctgctccggagcatccaggggaataatatattctatatttttctcccgggaaaacacagaatcaagctccacggaccattcgtactttaacccaactttcgtttccaaatcgaacacgatctccggctcaataatcaacgtatctccaacagacacatgatatgatccatttacatttccgattgtaccctctgccaaattgcgataatcataatcgcctttatcttcgtaacatcctgttatgctccaagccatcacaagacacaatatcaatatctttttcataacattcattattaaccgattaccgtcactgttattctagttccatcatcctcgtattccggatgagcctccaaataacgcttaaacttcaaggcatactcccgtatatatttttcctcaacacccgtcagatcagtcacacccacttcccgacaaaaaatctcgtatttcttaggagtaaatccacctaaataatatttattaactgtctcgtcccaccatcctggaattgaaatcgctgaagtaaagtatatctttgcttggctataaatagtttcacctatttcaaaaaattcattcggctcaatttgtaatacaacccgacaataagcatcttccaattgagccgttttcttcaatactacaaacaccgaatcgacattcacacctttatgaaaaaccatctcatccggaaatgcaaaatccgcatctgaaagcggagataccaccttcccatctttcaacaatcccgacaaagaatccactacacacaacttgatcgggcaatcctcagtcaataactggcctcccaaattaaatttcacggaaacttcaatcgcatccttcccctgatgaaagaagaaggtttccacgatgctatccgtagccggattattataaaaactcaaataattaacactactatatgtatcgaactcatcttccttacatccgaaaacggccaaaagaaggaataaaaagataaactgtcctttcataatctttatatttttggtgaccattatttccctattgatttaaagttacatcttcactatccggaattgcgaaaacaaacgcctcatccttcattcccgaataaaattctgtccccaacttcttatacaagaaaaacaactgtccttcaccgataaacgtacggtaagcatcatttatccatgccttatggtaatcctcaagactttgtaccgttaccggggtataggcacccgatgcctgctttaccaccgtaatacgagaagctgccgtcgcataatctttaatagaggcataatactctcccgcaatatactgcatctcacttgtacgaataatcgggatgatttcattagggatcgttccttgatcagaacttacaggaagatactttttactcactttattcgctccatccaaattttgcatatgataatacccacgataatcataagtatcagatcccaatatcttatttagtgccgtgttcgacacgcataacaccttattggttccggtatagtaagcctcaaaaagttctgtcaatttccgattactcaatgcaaatataacatcctcatattgcttgggcttagcataatctcccttaaccggaaaagacccgttatctatcacttcctgagcttgttctgccgctaattgtaactcgcctttataattatatacacgagccaacatagcggttgccgcatagtaattcatcctgaatccccggaaacaatagaataaatcctctaccgctcctgcagttcctaataaacgattagttgttctcaattgatcttttctcacagaagaaacggtatcaaacgtggccaataaagttttggcatcttttaaatcccgaataactttgtccaaataaccttgtacattctcccgtttctggaacatcgcaggatgagtttcacaataaggaagatactcgttattatcattaacaggcacatatcccgttttatccccatttaattcaactgccacgggagcaaacaagcgtaataaatcaaagtgcaaaaaagcccgtaaagccaaagcttcccccttcaacatattcttttctccctcacgccccaaaaattttgtaacatccgccttatctatattctgaatcaaattattacaatttgctattgacttgtaagccccctgccaaatactctctaaaatccctttgacctcactattatcgtaatcacctttgtaagctttaggataagccccgtattgattcatcttgtcaaaattataatattgagccagcacatccataaatccccaagtcaattgttgagcatacatatccgattccgaaatccgggaataaacgccgttcaacgaattacgatacccttccccgtctgcaaaaaggtcttcttcatcaacttccgattgcggagtgacattcaaccagccattgcatccaaacaatagcggtaaaaacaatagtaacaatattttgtttttcatactcatcgcattaattaaaattaactttaatagagaaattatacgaatgagcataaggaaactccgttccccgctcttgcttgatcgttgagattcggaacaattcatttgcacctaattcaaaacgaaccaaaccaaatttatattttcgtaagaatttagaatccaaatcataacctaatgt

SEQ ID NO: 289 - DNA, 5870 bp, Butyricimonas faecihominis
gtgtaaatatctaattacaagaatccaaaaaaaattgacaaatagatggtgatatctaaaattgatgtatatttgcagcgcattaaacgatcgtttttttataggaaatgatgtttatgcagacagcttctatgcgttattgctgtttaagtatagcgtacagaacacatggcaataaatcaggactcgtggtagggttagtgcgcgaagcgtatccggtcgggtcgtaatcttcgaaattgccagtataaacacgagcttttgttaaaaaacaatcaatgataacgactgataaattaaactggtatgccgcctatacccgtgtaaatcaagaattggtcattaaaaagaaattagacgaattaggagtagaaaattacctgccgcaggaagagcgggtacgcgaaactccacttggtcggaaaaagatccgggttatcctgattcacgggatgatctttatccggacagataaagcgactagtttttctttactgaacgatcatctgttgaatattgtttacttgaaagaccgtgaaggacgtcgttcattgattattccggataaacagatggaagatttcatgtttttattggatttttctaccgatggagtggaagtgcttaataaggatctgaaaagaggtgatcgtgtacgagtgatcaagggacctttgctgggcttggaaggggagctggtacgcttgaaaggacataagcgggttgtcattcgattggatggtgtggcgtctattgccacgtcttatataccaagttcgtttctagaaaaaatagagtaatagaaatcaatggaaaagaatttatttcgggaagtgtacaagcaggtgtgtggattggcgttgaaggattgtcccccctcgtccttgtctggacttttgcatggttacttgtcggtttattcgatggtacgtgtgtatccatggttagaagacgagtatggcagtctttgggatattcatgatcgaatacgagagattgctagagtgattcaggaattgttgaaggataaagatattccagtagatactcgtgcggggtatgctgtagatttgatggatgcttacctgttgtattcggatatgaaattcttggatgtggcgttagatactgcttatgagattcttattcctaaagggggtgataagatcgtgctgccttgtcatacaccgaatgtttgtcggttgctctgtaattgctattattttacaggggaagaagaatatggtttattggtgggaaatcttgtgacggagattttaggattaagtcgtataacaagtctagaggaattggttgattggtggaatgcgataggtctttacgaaagtgttgtaggggaaatggaccttcctgttgaagaacaaagacgtatgacgaaagagcgtgtacgttgggctgttcgagtacaacagtgggaagatggaataacaaaatgtgtttttgggacatcaagcgatatttctcaatcattggtaaacctattttatgttttagcaaaacgaaagtttactgaatacaattcattgtacggaaaatgaatatagagattttgtgttcaagtttagattgagaaatcattattttgcttccctattttgagtcttgggtttcaaggtgttttatggtatatgtggatagtcaaaggatatctttacggtatcgtaaattaatatgaaacttttggaggaaatactactatttgaagagtaattcgcttgtatataaaatattacttgctcaataaataattgtaacatgtttaaaaataaagtattgatgattaccggaggaactggttcttttggtaatgctgttttgaaacattttttaaattctgatttgagagagattcgtattttttctcgggatgagaaaaaacaagaggatatgcggattgaattgaagaatgataaattgaactttataataggtaatgttcgggattttgatagtataaataatgcaatgagaggggtggattatgtgtttcacgcagcagcattaaagcaagtaccgtcttgtgaattttatccgatgcaggctatttgtacaaatttgtatggtgcggaaaacgttttggaggcagcggcgagaaataacgtgaaaaaggtagtcgtgttaagtacggataaagctgcctatccaattaacgccatggggatgacaaaggcgttaatggaaaagttagctatttctaaagcacgtgatcagcgagttcaagataacggaggtgttatttgtgccacgcgttatggtaatgtgatgtgttcccgaggttcgataattccattgtttatcaaacaaattaaagaaagagttccaatgacggtgactgtaccggaaatgactcgttttatgatgtctttagatgatgcggtgaatctagttttgtatgcttttgcacatgcggaaccgggagatctttttgttcaaaaagctccggctgctacaattggtgatctagcaattgcggtaagggaattatttcaagcggataacgagataaaaatgataggggcacgtcatagtgagaaaatgtatgagacgttgtgtacgaaagaggaaatgtccaaagctatagacttggatggtttttaccgtgtcccggcagattttcgggatttgaattacacaaaatacgtacaaaaggatggtccgaaactaattcatgatgagtataattcggaaaatactcatcggttgtctatcgaggagttaaaacaactattattaactcttgattatgtgcaggaagaattaaaaacttatagaaaataagcatgataccattagttaaaccgtttatcccggctagagaagtgttgatgccagaattggaaaagatcctttatagtggttatatagccgaaggggaagccgtgtatcaatttgaagataaattccgagaatatttaaaaaatccgttaagcttagctttacattcaggaacagatgctcttcatttagctttaatcttggcaggagtgaaatccggagatgaggtgatcagtactccaatgacagccgaaccgacaaatacttcgattgcgatggttgggggaaaggtcgtttggggagatgttgatcctcgcaatgggttgttagatccgtatgacgtggaaaagatgatatctgaaagaacaaaagcgatcgtgctagttcattacgccggaatggtgtgtgatatgaacgagttttatcgtatttctcaaaagtatgatcttcctattattgaagatgcggcccatgcattaggtagtaaatatagaggacgaatgactggatgtaattctccttatactgttttttcattgcaagcaatcaagcatatgacaacggttgatggtggttttttatgcttgcagaatgtagaggaatttgatagggcaagaagattacgatggtttgggttagataaaaaacgttctcgtttggagaatgatatcacggaagtggggttcaaatacgccatgaataacgtgaatgcgacaatcggtaatgtacaaatgcgttatttggaagatgttattaatcgttatattgtaaacgggaaatattatgatcgggtactagcgggagtggatggtgtgcaattagtacaatattctcctgatacggaagcttcttattggttatacacgatgaaagtaaaagatcgagagaattttatcaaaatgatggaagccaatggtgtgatggcttctcctttgcatcatcgtagtgacacgcacagtatatttcaaacatcgaaaagaaatttaccgaatatggataaatggtacaaggagttcgttcatattccttgcggttggtgggttggtgacgaagaaagagaaagaatagtggaaacaataaagaaaggttggtaatgataccactttataagccttatatgtcaaagaacttgccggagctggaatctattctacattccggtgcgttgtcctatggaaggtggggaaaatcattcgagaataagttacgggattttataggaatagagaacctgttaaccacgaatagttatgcttctgcaattcaagtggctctaacggtattgggattacattcggaagatgaagtgataacctcaccaatgagttgcttagcttcgaatcaacctttacaaacatttgggttgaaaatcgtgtgggcagatatagatccgttaacgggaactctggatccggaaagtgtgcgtcagaaaataacagataaaactcgtttgattttccataatcatttttgtggttacgtggggtatgttgatgaagttaacatgattggtatggaacatggaattcctgtaatagatgattgtgtagaggcttttggtagtaaatataaagggaattatactggaaatttaggaacagacgtgactattttttcttttcaaacagttcgtttacccaatacaatagacggaggggcgattgtgtttaaagactcagacctttataagaaagcgttattgacccgtgattttggaattcgaagggatatttttcgagatgaaaataatgaaatttctgctaaatgtgatatttccctttctggttatggggcgacaatgagtgatataaatagttatatcggttgctgtcaaatggacgaaattatgatgttattagagagtcagcagagaaatgcaaaaaaatgggatgttattatagagcaaacgtatccaagattttataggttgaatcaaagggaccagatacaacctaattattgggtatatggttttttgtgtgatcgtaaaattgaggtaatgcttgactttcgaaaacaaggttattacgcttctggagtccacttaaataacaattgttattctgtatttggaaatacggaaaaattatgtggcgtgaatgattttatgaaaaaatttgtggccattccttgtggttggtggttaaatttgaatttataatgaaaaagcattcaattcaaatatcagaaatatcagaaatgttaggaatcccttttattggggcgaatgtttacattgaaggtttaaacctttgtaatagagagtcacgatataattctatattgtcatatattgcatcgactagatgtttgggattattgaaaaataatgaatcggtaaaagctttatttgtttctagtgatgtatatgatgaattaaaaatgggtggtttatttcagattccgacattgtttattgtagaaaatccggaagtttcgttctattatttgcatcatttgttgcataaaacaatcttttatgagaaatatgattttaagtcggaaatagggaatgattgttctatacataaaacagcagtaattgaggatggtgtgattttgggagatggggttcagattggagcaaatagtgtgataaaaaaggggactattattggaaataaaactgttgttgggtgttgttctgttattggtagcgaaggatttcaattgatatatgatgagcaacatataccttttactgtaactcatgttggaggaactgtaattggtaaaaatgtatttattggagataactgtacaatatgtaattctttatttgaaggatatgttacaataggggataatacaaagattgatatcaagtgcatgtggggcataattgtgtgattgggaaaaatgtagtgattacaggaaactctctattaatggggtctgttgaaataaaagataatgtatggattagtccttgttctacaatttctaataaatgtattatttctaataatgctttcgttggaagtaattcattggttgtgaataatgttagagaagatatgcgagtgtgtgggaatcctgcaatacctgtaaatgaatattttagaattttgatt

SEQ ID NO: 290 - DNA, 5870 bp, Butyricimonas faecihominis
atatgatattgttgttgggaacttgttacttttgtctgttgaatcatatttgataaagacaaagttattatgaatcctttaaagaaactaatgggggaaactgtgatttatggtttctcgacaatactcggacggtttataaattggttgctggttccactatatactagggtactttctccggttgataatggtatattcacgaatttgatggggtatgttgctttgttagttgtattgttgacttatggcacagaaacagggttcttccgctttgcaactaaagacaataaagaccgggtgttttcgactttgttgacctctttactctttacttcgactttgtttttattactctgtttttcgtttctcccgcaaattgttagttttcttgaggtggggaatcatccgatttacttcgttttattgattgtaacgatcgcaattgatgtggtgagtactttgcctttcgctctattgagaatggaagggaaagcccttcgtttcggggttattaaattcgtgaatatactcattaacgtggggttgaacttgtttttctatttgctctgtccgtttttggagaagaaagggatttctgttcctttctatcaagctgatggtggggtagtttatattttcatttcctatttggtttcttctgtttgcacgctggtaatgttgtttccttatattttccggttcaaatttgttttctcgttctctttgctgaaagatattttgaaatattcatacccgatcttgatcgtgagtgttgccgggatgattaatttacagggagataagattttgatgcctaaaattttaggagatggggaagaggctttggctataaccgggatatacggggcaagttataaattggctttagtgatgtatattttcacgcaaggtttccgtttcgctttcgaacctttctttttcaattacgccaagcataacgattccaagaaaatatatcaggatgtattgctctattttaccggattcggtttaatgatctttttaggggttatgtactttttggatgtattaaaatatttcttgggatcagaatatttcagcgggttgacgatattaccttgggtattgatggctaatttgttccaaggaatttactattcgttgtcattgtggtataaattgacggataaaacgatatacggggcttacatggcgattatcggttgcgtgatcacgataggaggaaacgtgattttcttgccgaaaataggttttatggcttctgcctattccgttttcacgtgttttttggttatgacgattttatcatttatcctaggaagacatttttacaagatcaattatgatatacctaagattattttctattttgcgatttgtttattgttctattttgtcggtggatatataaaatttgacaataacttggtaacttgtttggctcgtttaccgttattcgtactcttcgtatatatttttataaaaaaagagatgagttttttgctgacaaaagattttatgtacaagttaattcataaaaaatagctatcttagcgcaatttatgggagtagttaaaaatgtgattaacattcaaagttacagagagaatgaagattaaaatagtgaataaatcgaagcatccgcttccggaatacaagacaaaatcatctgccggtttagatatacgggctaatattgatgaacctatcatgttgaaatcgttggaaaggaaacttgttccgacgggtttgtttatcgaattacctgatggctacgaggctcagatgcgtccaaggagtggattggctttaaacgaaggaatcactttactgaataccccgggaacgattgacgctgattatagaggggaaatcggagttattttagtgaatttgtctcatgaagtaacacagattaatgacggggacagaatttgccagatggtgattaataaggttgaacaggctgaattaattgaagtggaggaattgggcgagacggagagagggagaggaggtttcggtcacacgggtaaacaataaatcatttataatgactaaactaggtcgattattatttgtttttttattgcttttgtgtactactcagctttttgctgataaaaagaaagtggtagaacctactttagaaggtgaggctaaagtacagttcgattatgctttcatggaaggggtacgttgtaaggttttaggtgacttgaaatctgctattgcctatttcgatcagtgtatgaaaatttataacaaaagtgctgcggtacgttatgaattatccagtatattggtattaggagaggattatacgttgcctttacaactgatgcgggaggccgtggaattggagccgacaaatatttggtataatttgttgttggctaatattttgcagagaaaatcaatgattgaagaggcgtgtaaggtatatgataaattgatattattacatcccgagagagaggatttttacatcgtggagactgatttgtattcttctgttgagaagtgggataaggctataaacgtgttggaccgttacgagaaacagtttggaataagtgagccggctattattgaaaaggctaaattatattccaagatggatgatgtaaagaatgcttcggcggaaatcatgaagttggtgaaaaaatatcctgaaaaaacagattatttgggtttattagccgaactgtatttgtcacatgatcaagagaagaaaggtcttcagttattgaataaaatcgtaaaaaatgatccggataatggttttgtgcggctttatctagctgattattatcgtacaaagaatgatactttaaacacggaaaaatatattcgttcggccttattgaatgataaggttgaaaatggattgaaggttcaatatttgctgaagttattagttaaccaaaacgatgcgaatatttctttggatcatatctattcctacgtgcaattattgttagagaaatatcctgaagatatagccgttaggactttgaatgctgattttctgaaacggtataataaactggaggaatgtaagggtgaactggaatttcttatttctaaggaaaagaataattatttggtttgggaagagttgttgatgttatataatcaattggaagacacggctgccatgtatcgtggagggttggaatgtttgaaatatttcccgaatgagccgttaccctacgtgatgatcagtttgcctttactgattcggaaagatttagagcgagcaaagggatatttggaacaaggacttgccttgtctccggataattctcctattaaggctcagttttttgcctatcttggtgaggtatattataaacaggatcgtgttgaacaggcttttgccatgtttgacagtactttgttgataaatccgggtgatataatgacattaaataattacagctattatctttcattacgaaatgagcatttggataaagctgaaaaaatgatttcaacggcattgagtgctgatccgaataattcgacttttttggatacttatgcatgggttttgtttaaaagtaaaaattattctttggctaaattttatatgcgttcagctattgagaacgagaagaacccaagtggagttttatacgaacactatggagatattttattcatgaacggagaaaaggaggaggctgtgaaaatgtggcagaaagcattggaatttagagatgaagaatgtggtgatttaaaatataagatagagaatggtttaccggtagatcatgagaagtagttgtgttttattattgattttgttgtgtttcgtgtcgtgtagatccgtgaaggagattacggaaagtcgtagagatttaccgaatattaccgaaggaaaattgtttaaaaatattatttctaacgagttagattataatacgatatatgcgaaaaaggttgatttatctttgaaagataacaagaattcccatagtcttaaagctattttaagaatacaaagagatagttttatatgggtttcagttagtgcctctttaggagttgatgtggctagactactattaaccccggacagcgtgaaatttatcagccctagagagaaaaaatattttgtttctgattatagttatttcgcagaacgttttgacgtgggtttgacatttgattgttttcaacggatactgacaaatcaattctttgattttgaatcttgtaccacggaggctgtacggggaaagcgttataaatttgataagtcgggtaacgattatgtattgtatagtttggaagagaaagcattggggagaaaattgaagaaattatacaagaagaggagaaagaataaagaattttctttagtgttacagaaaatacatattgatccggattgtttcagacctaatgctgtttctatcgaggatttggaagagggtgtcggaatgagcgtgaaatacaagtatataaaggattttggtgggaaattgtttcccggaaaaataacttttaatgtattttcggataatgataattgggaagttatattgaattttgaccggttggaatttgacgtggaagtgtcacctaattttaaaatacctagtaagtataaaagaatgtattagcatggatatttgtcgtaacatattaatcgtgattttcttgttttctttcactttttcttactcgcagtcgattgacgcgattaaaaagaaaaatgaaaagacggagaaggaaattgcgtatttgaataagttactggaaaatgcccgtaaagataaatcttccactatacagaaagtatcgatcatcaaccaaaaaatcagtaagggaaaagagatgattcaatctctcacgaacgaggtgaattaccttgatggtcagattaaaaagaatgagtctgttaaatctggtttggaatccgataaacaacggatgctggaattctattctaagatggtgtacgagacttggaagaagaggaatgaatcggataaattaatttatatattttcttcttcgagttttgcccaggcttatgcccggtataaatattttgaacaggttcaggattattccaagcggcagattcagttaattgaacagacaaacgactcattgaccgctattaataaagaattgagtaaattgatgactctgaaaagtgaaacacagtttaaaattacctctcaaaataatcaattgatccgggaacaaaatgaggcgaacacgtatatagcggatttgaagaaaaaggaaaaagaactccttcgaaagttgaatattgagattaagaacagagaacgttttaaaaaagaattggagaaactcattgctgttcaggctaaaaagtcgggaagtaaaaattctacatataaattaacaccagaagagaaacttatttccgacgatttcgctaaaaatagaggaaagttaccttggcctgttgaacagggatttgtgtcggagaaattcggggtgaatgtacaccctgtttttaaacaggtgaagttaaataatgcaggaattactattacgacatcccggaatgctgatgttagagcggtatttaagggtgtggtgacggaaataatgtttatcccgggggataataacgttgtgattgtgcggcatggaaattatctgacggtgtattcgaacttggtggagatatttattaagaagggggacaccgtcaatgtgaaacaaaaaattggcaagctggctgtgagtagtggtaataacagtacgttaaattttcaagtttggagagataaagacaatttagatccacaattatggttaacgccttggtagagtaggagtatgtttgaaagattaataatatactttat

SEQ ID NO: 291 - DNA, 5837 bp, Butyricimonas faecihominis
atcatgatatataaaaaataaaagaggaagaattggtcctcttccccttttctatttagctaaatctctccggcaagagagaattaataattaatggtacacaaatctatgaaaaaaaaatcaaaagatggcacatcccggtgcgggaaagtgacatgcaaattttggaaagttatgcgattgcagctattaatgatttttgtgacactatttcagttacatgctgaaaatagttacacgcaacaaaaggtgagtatcctgtttaaggatgccgcgatcgaggaggtaatcaaggcggtcgaggctcaatccggttacgtggtggtgtataacaatacactgttgaagactgtaaaacgggttaccgtgactttacgggatgtgaatgccgtggaggctttgaatgaggctttaaaaggaagtggtttacattgtaagctggtagaaaatttcttggtaatcgccaaggataacgtaaaaacggctccggaagatgataaggggagaaggattgaggggaaggtgacggataaggataaaatgccacttccgggtgtaaccgtgctggtaaagggtacgaaattgggtgtggtgactgatacggccggaaaattccagttaacattaccactagagaaagaggtaaccttacaattctcttttattggaatgaaggctcaagaagtgaaaattaaggattataaaccgctttcaattgtgttggaagaagaggcaacagaggttgaggaggtcgttgtgaatggtatttttcaacggaaagcgggaagttttaccggttcagctttgacgatgaaaggggaggatttgaaacgagtaagtaactcgaacgtgtttgccagtttgaaaaatttggacccgtcattgatgatttttgataatttagaatttggttctgaccccaataagatgccgacgatggctttgcgaggtaaaactgcttttgatttaggatcggatgatattgatttgaagggaagttatgcaaatgacccgaacgctcctttgtttatattggacggtttcgaggcctctgttcagaaaattgccgatttggatatgaatcgtgtggagtcgttgacgattttgaaggatgcctcggcaaaagctatttatggttccaaggcggctaacggtgtgattgtaatcgagactaaaaaaaataccgaatcttctttgcgaatctcgtatagcggaagcgtggaaattcaggctcccgatctttcttcttacaacctgacgaatgcggcggaaaagttggagatagagaaagatgccggattgtattacgataaaaatctttcgaccttgtttaatttgcaaaaggattataataaaaaactggcggcagtggtttccgggattgatacggattggttatcaaaaccattgcgtaatggtgtcgggacgaaacatggtatttctttcgagatgggaaatgaacggttgaatttgattgtcgggtttagctataataacgttcaaggaacaatgaagggttccgaccgtacgaattacgagggtagtgtgtctatttcatatcgttacaaaggactgaatttccgagataatttaacgattacatccaacgtggcaaatgattcaccttacggggctttcagcgagtacgcggttttgaatccttatctttccccgtatgatgaaaagggaaatttggtacagaatgccagtatcattcccggggcggataattttgaggcaaaccccttgtataatgcctctttgaatacgaagttaacaagtaagtatcttgacgtgacgaataatttcagcgtggagtggatgatcgtgatgggatggaaagtaacgggacgttttggaattacggaaaaaagagtgcgggcagatgagttctatccagcgaaccatctgaagttcagaagttattcgggagaagatttgttccgaaaaggaagttaccaaatgaatgaaggggaagagaaacggatgagcggtgacgtcaatatgcagttctcgcaacaatttggagataaacattacgtgtttgccaatgccggctttactttgtcggaggcttattacgaggagttgatttacaaggcagaaggtttcccgcatgaccggatgaacgatatgatgtttgcccgtcaatacgtgaaggataccaaaccgacggggcgggaatccacaattcgggatattgctgtgttgtttgccggtaactatgcctatgatgatcggtttcttgtggatggttctttccggacgagtgcttccagccaatatggaaagaataaccgttggggacaattttggagtgtcggtgtggggtggaacatacataatgaggtgtggttgaaagactctaaaatacagcaattgaaattgagaggttctgttggatataccggagcgcaaagtagcgaggcctacgcatctttggctacttatgaatatgatttggaacgggtgtacatgggatttctggggtcgaagttgaaggcgatgcggaatgaagatttgaagtggaaggaaaagtttgattataatgtgggtttggattttaatatcggacgtttgtttagtatgaagtttgattattatatcggaaagacaaaaaataatttattggattttgacattccgacatacacgggttttaaaacggtaaaagaaaatgtgggtgacgtggagaataaaggatttgacctgcggttgagtataactccgtggaatatgcctcgggaacgagcctatttcacaattaccacggctatttcccgaaacaagaataagataacgggagtatcggcagctatgcaaaattataatgacaagcaggatgaggttgcaagtagtgttttctataacaaaccggtgcaaaagtattatgacggggtttctttggatgcaatttgggcggttcgttctttagggatagacccgacgaatgggcaggagatttatttagataagaaggggaaccgaacttacacttaccgggtgtccgatcaggtcgtttgtggagataagttaccggatttccaaggaacagccgggttcatgtttagttataaggggattgaattgaatgcgactttccgtttccagtacggggcgcaaatgtataaccagacgttggtagataaggtagagaatgcctcgttgaaagggaatgtggataaacgtgtgtacgacggtcgttggcgtaatcccggtgacttgaaaccgtataaaactttgggaaaccaatgggttgcagaggagggggagtacaaggatgaaaaaacgcaggctacctcccgtttcgtgcaggatcggaatgaattgagtctctcttctctgagggtagggtatgatttctggaaacataattttatcaaaaaagtcgccatggagcgtttgagagtagaattctacatgaatgatgtatttatgttatcgtcgattaagacggaaagaggtacggcttatccttttgcaagatcgttcaattttgctatacaagctacattttaacactagtgattatgaagaaagtacgtgatatattttgtgttttactgttactctgcacgacaatgtcttgcgagaattggttggatgtggacccgaagacagaaatcaaatccgaattgatgtttcaatcggtgagcgggttcaaggatgctttgatgggggtttacctgacattacgtgatccggaattgtacggaaaggaagccacgtggggttttgtggatgctattgggcaacaaacggatattcaggatcaggcagccgcttattataatgcgagccgttataattattcccagacttcgggagtttcagatgctctttgggccaaggctttcaacgctattgtgaatctgaataatatgttggaaaatttagataaacaacagaatttgtttaccccagcaacttatggggtgttgaaaggggaagccttgggattgagggcattcttgcattttgatttggtgcgcttgttcggttggggtaatttggcgaagaaaccggaaaatttggagaaattgtgtatgccatacatgacaaaatatgataaggttttgacgaaacaattgactgttggtgaagttttggctcatattgaagaggatttattggcatcgatagaattgctgaataatagtgatccttacggattggcacctaagcaggatgattatgatttaccaaacgaagataagtttttcgataatcgtgaaaagcgttttaattattgggcggcagtttgcacgttgacccgtgtatatatgtggatgggacgaaaaggggaagccttgacgttggcaaaatcttttattgacaagggcggtcggacttcttggattgattcgtacacgattgacgcttactacgagaaagatcgggacctgaccttttccagagaacacgtgtttgccttggatatagcagagcttttcgagagcgttaaacattatattgatcccaatgcaaacaagcctaaccggaatgccgatttgttatatcattcgagcgagcgggctaataagttattcgaggctgttaatggtgtaagcacggattatcgttataaacggtggtacaataaggtgaatgatttttttgacggctgggctttctataagtactgggaggttgaggagtactcgcatgggagcgtgttacctctaattcggaaaccggagatgtattacatggcggcggaatgtctgttggaaacgggtaacgatgccgatcggataaaagcaatcgagtatcttaacacggtgagggacaaccggggaattgcaaaactcggtaatgacatgacggcgggaaccgtgcaagacgagatcacgaaggagtatcagcgtgaatttataggggaaggtcagttgttttattactataaacggttggggttcgagaagattccttactcgaccaagccgggtaacgatgcggtttacgtggtcccgttaccctctggagatgtcggcttgggtggaatggaagattacaagaaaaaataacggattaaaagagtatgtgtatgaaacagatgataattaggttaatgatagcggcattggcaataagtttgtgggtgtcgtgtgatcaggagaagaccataatgtaccggcaagaggccggagtgcggtttatgtatcaagctgaggatgaatatagtttcgtggataattatggcgagacggtacatttgtattatatcacggttgcgacaacgggagattccgttgattatgaacgaaaggtgtcgattgccgtggtcgaaaatgatacgaattacgtgaacacggctcgtccggaacaatataaattgttggaaggtgtggttcctgccgggtctttctctggtgaggttccggtggaaattcattgtacaccggatatgagtgacagtagttttgtggtaaatataaaattggttcccaatgaagacttcccacttgccggttttgacaatcgttatttcgagctgtcgatgacgaatcagttggttaagcccaagaactgggggaatcttgctttttattttggtcaacaattttctataagttggtaccgttttattctgaatgtgttgaatgtatcatacattccttatccttcagctcaagagggggatgaaaagtggagttataatcagttattggctaatgccgggaaggtaaaggctgcattgctccagtataaccgggaacatccgaatgatcctttgcggcatgaagatggggattatgcgggtgacgaggtaaaaatgccttaacgggatgtttatagagtgatgtttaattcagtaaagaagaaaacaatgaaaa

SEQ ID NO: 292 - DNA, 5829 bp, Butyricimonas faecihominis
caactctccccttgtaaagcaatttccgtaccaaaacttaatcttttacgaatactaaattttcattttattaaaattggggatatcctaatacaagaacatccccacaatcgacacgcttttaccgattcacagcttaatactctcaagagctttcaaggccacctcatccttggcatccaacgttaatactttagagaaaaatgactttgcttccccgtattcttcttttgccggatcaggattcccattattttttgtggtaatagcatcagcaatcacgtaatgataataccccaagtatttataactttctatcagttcccgtttataacgttccggttgtactgatcctatttctattactttctcgtaatatggttttgccaaccccttcgttgtttccggatcaagcatggaatttacccgagcccgccaaaaataactcacgtaactattaggaacttgaatacttaactctttgaataaagtatctgcttttatcagctcttccttttgcaattctggaactgaatcctgacaagccagattatagtaacatttccccagtttcaacaaatcttccgcggccggttcctccacgaaatcaaaatattgctgataataaaccacggccgaatccaattctctatttttcacgaaaagatccgcaatatctttcaataactcctgacgtttaccatccgcattcaacgcctttttataataagtaattgcctcgttatactcttttttcacggtcaactgttccgcgtaacaaagataatcctgacaaatctgactctcttcgggagtagattctataaaatgctttatagcctccagacatttttccccattctcccgtttagaaagacaataagcatataaacgtttagccaccaaatcttccggcttttctctcaacacggactgaagtataggtaacatcttatcatactgtttatcgaaatacagtatgccggcatatctcaacaaattattctggtcatagtatcccgactgaataaatttagaataattatcagctgcagccttactatctccggtcatttcatacagttcccctaatatacaataaataccacaaaattccggggatttttcccgggccttatccaacttttccaatgataaggaacgattggccgacatgtacaagcgagcctgttttaaatatgctcccacacaatccggactaaaataagcggccgtttcgtatttggcacaagcctccccgactttcccttgtgctgccagaatatctccttccaccaagtacggcagcccacttttagcatccaactctctcgcctgattcacgtgttccattgcttttgtcatattacctgcatacaaatatgctctggctattgccaactgcacgccggcatctttcttgtcttttttacttgtaagcacctctttgaacaactcttcagcgtctacatctttccccaatttcaacccaactaacccgatccggttgtaagaatagtcaggcataaactctattcctttctggtagtataccccggcagaatcacgaagccccgacaccagataacattcccccagatagtaacaggtttctgcttgcaaaactccctctcgttgttgcttcaaattatcgaggaaaaaagccttggcagccccgatcattcccgattcataaagatctattccgaccttattgtctgctgccttcacgctcctcgctgcaagcaagcaaaataatccgcatataattaatttcgttttcatgatcttaaaattattcgttaaagttggtccctcacgttcacgatattcacaggcatcgtggcaggtaacaatccggctttcaaaatgattcgctgtcctcttgctcctgcaaaaaaggaggttaacccggttgggagtgcgctccggggatcattcagtaaaatatatatatcacgagacaatggatattgccccgtgtagaggtaatactggtaaggctggtaactattcccgtaagtaggtaactccgcacgactgatccgtgccacctgtatctcttttcgaaaatcccggcataaagaatcctgttcgtcactaatccaattgaccccgattacccccatagcaccgggagttcgagtaacatactcgatgacatcccgattcgttccggcggcatgacatcgatcagacaagttaccccacccgcatattgaatccagcacgtaacgtactgtgctggaattccggtggtcaaacacaacttgtatttcacccaatttcgaatccgccgacaattggttccaacgtgttatctctccggaaaatattttctttaaagtactcacattaaatatcgaatcggcattttgcctgtttacaatcaaagcaacaccatcagtagctatcttgatggactccggaaaaaacttattgctgtggaatgactctaattcgtcccccgataaagggcgtgtggccaacacccagcgcacgctgtcgcgtaacaacagggttattgcatccacttcactcgtatatatcgggacgatacctgtctgattatattgcgcttcaaaaactgcaatctcatcctcggccaagggagacagcgtttcgtcgactgcaactcgaattaccccgctaaacaaggtatcttgtactcctgaagttttccctttacaagccacaagggagatcaggcataacagccaaaagccgattcgaatattcataacctttctaatttttgatttacgattttagatttagtaattttcactcgctgtccaacgctttcttttaatcacctaatcggcaatcactaaatcacagaatcatttcttttattgttgtaatttaaacgtgatcggtaaagtgaaccgcacggaaaccggttcaccccgctgtcttccgggaatccatttacgcatggcctttaccacgcgaacggcttctttatccagcgtcgggtcgaccgtacgcaacacttgtacatcacgtaccgacccgtcccgtccgatcacgaattgtacgattactcttccctctatattcatttcttgggcaatagaaggatacttgatctctttaccgatccatttcatcaaggcagccataccccccggatattcgggagcttgttccaccacttgaaagacctcatcttcacttgccacgatcaatttatggtcttccagatcagcaatatccttaccgttttcctcgtcattacccttcacatccgccacggaaatcgccgcttttgcctgattcacctcatcctgtgttttaatctcgtcttcctcacgaacctcttcatctttcttaatcacgggagccgtgaacttaatcgttgtcttcaacgtcggtggcggcggaacattcaccgccacgatcttgttctcttccttcacctccggcaaatccatcttcaaatcagacaattccgtcaccgtaaccatcttttcctgcgccttaacgggtgtcagaaaacgaacaaaagccggaagaaccattgccagaaccacacaacctataatcacgacataggccgtcaagtgacgccggggtgagtgtttacgcaactcgtaagccccataatccttattctttccttcgaatatcagatcacaccactctaccgaatttacatttatatcctttgccatggtcttattgttttaactcccggtactcgatgacttctttcaaatcatcggcatacccgtcgtgtgtcttatcctgtaacaatcgcaaatcccccggagttatatccatgatcgcgtaccgtccgatattacatatctgcatctcatcaagaacatcaatcaaatttttgtaattcgcaaaatcggtagccttgatcaatataacgggagaatccttatcttttctgatctcggcagcctctttcagatattcctcgttcgagatctccaagtttgctttcttttgtttcaattcccggatcttctgcatcaccacctgattacgtcctaacaggattgcacgcaaaccgttcggggaaaaatcagtttcttgcaccatatcgggattctcgtagtccggctctcccatataatagtacactctcccctccttacccaataaaatagtcattgccttggaagccttcaccttgttttgctcctgctcattcaacaaatctttcctcggcatactgatttccattgtctggggtttactcatggacgtgcagagcatgaagaaagtaatcaacaacatattcatatccaccataggcgtaaaatccacccggatactgaatttcttctgtttccctttcttgcgttccccgctatccttttgttgtatttctgccataataaataaattacaagttataaagtcccatcatacctccggcatattacgcaacgaggtaatcaagttataacgattctctcgcagattctgcaacgttgccataatatccttaatcaacgggtaaggagttttctgatccgccttgatagcgatcaccaagtccttgttcacctcccgggcaaattgcatccacgatttaaactggttattcgtgctatcacaagggattccataattcatgatcactttatcctgttcttccgacgataatgccaagaattgtttcatcccctgaataggcaccccgaatgaattacacagactgaattttttcaattcctgatccgaaaattcaatctgataactctcccccatctttttcaacacctcgatacgatcctgtggtttatccagtcccatgaacacctttcccgttggctcgactaaaatagagacgatatttgattcgggaatcttgatctcggaaaccgactgcggcgggttcacctgcaccggttctttctggataaacgtggaagtcagcatgaaaaacgtcaacaacagtaccgtcacgtcgctcatggccgtcatgtcgataaacgttgatttctttttaattttctgactcataacgtatatattaacaagtgtatactagcgttgtttaatcgtgaaactctgtaccaagtaagccccgatctcgtcaatactatgcgtgatcccgtctatcttactggtgaaaaaattgtaagcaatcacagcacacgccccggttgcaataccgaaagccgtgttcacaagcgcctccgaaataccggtagaaagggcaatagaatccgttcccccggcagaagataatgcagcgaaagacttgatcatcccgattacagttccgagcaatcccatcaaagtccctaaagtagtgatcgtggctattacccccagattctgttccatcgtcggcaactcaagcatggtagcctcttccagatctttccgtactgccaactgtttctcttctttcgacaacgtgtcacaagctgacacctgtgaataagtagaaagcgatgatttaatcacgtttgccacggttcctttctgttcgtcacaagcttggcgaacagcctcaatattcccctcctcaagatcactcttcaccttcgtcacgaattgttgcaaattcttcttcccttttgctctttttaaggcaatcaaccgctccacgcttaaagtcaataccgtaaataacaaagtctggataaccggaacgatgatccctcctttataaatcgtacctagtaaatttccctgaataggatgattattcgggtcattattaataaaattagccggattaccatacacgaaatgataaataaccattgccagtataaaacacagaatgattatcggaaatgcagaaatacctaaacttcttcttgttccttgttttgttgcagtctttttcatagg

SEQ ID NO: 293 - DNA, 5804 bp, Butyricimonas faecihominis
atattgggcagagtatcattgtctgccaaagatgttgctaataattatgaggttgtgtcacaatttcgacacaacctcgtttttgtcaatgtttactttttctatttcatcccattctgccagagagataatgtcatggtattgtttcaatgataaaacattctcctcgctatccatacattcgtattcccatggaagttgataaacggttccttcttcatgatggcccatgtagtcgtgaaatgtgtacggaatcaatttcacatgatccttctccttgagtattcgtaaaagtttggcagcgtcgtgtatttccaaaggagcgccagacttgtatagtgcagtggcgacttctaccgcaacatccacatacgccgagtagctgttggaaacaatgattctccatccggggctgtcaaaatccgatgcgagtatattcaaccgcaacaatcccagttccccataatggtccgaggcgaatttgttgaaatccgtctcactgtcgagagcgtatttatcctgcaaatcacagaatttaaccatgttgtaatatgcgacatcctgtaattccaatggcactccattcgggagggtacgtatctttcgtgtagtatcaaacctttcaaaataccggccataggcttcatgagcgatccgataatatttgcaatacgaacgtatcgtcattgtatctaacggccgcccgaaattcttgcagacggaatcctccagtgcttttattgcagtcgtctcgtcttcgacctcaattttaaatctcggttctattctgttgaactcctttctcgcaattttcccgtctcgctgctggtaaggaagatgattcgctacataatcattgaactcctccggatcttgtatgatagtatcgattagcttatgaaaatataaggtcaacttagccaagaaatccctttgccattcattgggaaaattgttacctactcggtttatatatcgagaataattcgcaatagtaaaatacgagtgtttcctatccgtgaattgtatggtgcgattttctctgtacctggcggagctgacatgataccataccgtttctctgggatttgacaattcccaatcccggaggtattcttccgtgctctcatattctccgtctgcaatcgacgcgtcgcaatctccccattcttcctgagtagggcggggcaattcgatataaaatcctctgtattcattgtcacccatctcttccagttgagcaaattgctcctgaagtttaactaacatcttcaatgtatcgttatcaaccacgatttctgtattgcgcccgcttccgagctgttcgaatatcgcagcattcaatccgcattcttttgccaagtctatgaaaagatgcctggtaaagattgtcttcttatgtcgttccatatctcattcgttttcaatcgttaaaaatttccctggatcaaatccattgattacatgctcgttttcaaatgtatatcccatctggttgcaaatcacttttgtactcccgatttctgtgtcgatattggtatgcgaatgtccgtaaatccaagcattgatccggctgttagcgatcaggtctccgtattcactggcaaaggcactgttcaatacggaacctttatgctgaggagcaacaacctgcaaagtaggcaggtggtgagtcacgaccactatgtgttctgccgtactttcggcaagactttttttgatatgccctaaacagaagtcatgcatctgattatatgcttccgtttggagcagtttccctttgtacatggtctgacggaaatcgttaagtcctttccaaacgaaatattcgtctgccggttcgatatgcgaccaaaatgtgctcattatgaaatcggtatcgtctattctcaatacttgattttgataataaccgacattctctttgaacatccatcgccattgtaatccccgttccatcacatcgcaataattgtaatattcatggttcccgggaacaataagaacctgcctatagtttttagatgcccatttccagaaattccccaaaggagccactctgtctttcagatagaaaatgtctccggccaatacgagtatatcgcccgttaccggaaatctgttttgttttatgtacctgctgttctccctgaactcaaaatgcagatcgctcatatattgtattctcatattacttatttttatttgcttgttcaacctgtttttggattatcctctttaccagctcaaatgagaccggagtaaagtcattattatccactcccacatcatattgcgtcggaaagagcatatccagccgtgaagcgtcttttcccgtattattcttgctcgtatgcacatgcccgaacagttgccacatattcctgtaagcacctccatagcagaggaacggatagtggttcaggtagattttctgcttgtcgacctctatgtgcatttgcatgcttgtcaattcaaacctgctggcgtacccttgcctgatattttttagatcatgattaccgagaatgagatagatttttccattcagtctgttaagaatcttggtccattcatgggatcctcccaggcaaaaatcccccagatgaaacactatatcatcttgaccaactacccggttccaattttcgatcagcgtttcattcatatcttctacattcttaaatggcctcttgcaaaagtcaatgatattcgaatgataaaagtgcgtgtccgatgtaaaatacaccttgcttccgtcaaacttgtaattcattttgctctcttttgtgcacattgctgtgcggttaattaaaattggttgttcttgtgctcattgtacggaaatgacgagagaggaattgcacggagcaaacagtcaccaatgggcataaaacaaaatagttggaaagttcggtaaggactctccaactattctgttgtttattttaagatcaagatacgagcatctatcgcatcttatctcctatatctgttcgttggaaagtatttatgatattctctggcgtttcaatgctccaaacatgaagaacatacgactgaacttcgaagcatttgttgcctcgaattgtcgtttgggataatatgttcattctattttgttgcattgtaaattttcaaaagaggcgcaaatatacagaataatttcgcaatactccaaatatttttcagtgaattctttaaattaccctataaaaatcactgatattcaaatatacaaatcgcttgattatcagaatctattttggctgaaaaaacaattcagttctattcgaatattatctgtaatttggataagttttagtggtactgataaaatttgcctatttatcactgttaaattgtatgagggacagaattttgtcccttgtatccgttcagggaacaaacgggggacaaaatcatgaaaaattgatacaatactttattattcctttgcatttaatgtattgattatcaatgtcatctaagttggactgtttcttcttttactttctattgtatattgtgtagtatgctgataatcaatttgttatatgctgttattttccgacgcagtatgtgtacatcattgattatcaatagtatagcactctaaaagatacaaccagcaggttggcaagtatctgagaatgtgtaagttagtgatttttagcaccattctcggcttgtatctccattttggaaagtaaaagtaagtgtaatttcttgaatatcaaaatatgcggtacaaaaacttgtgaaaaatgccgttttttgatgagaaaaggtacaaaaatagctctgaaaacaagggaacattatgattgttttgcaaaatactcagtcttcaaccaataggcatgaatcgggtcctgaaacgagaattcagcagccttattatccaatatatcattcttgataagagcaactttagagcgggagagtgaggtcgttgacgatgcatcacttcagtcgaactgatggccttttcgcaggcaataagagctttgagacagttcaattgctgtgtggtcagtgtttcggtgattgtcacaaacaacagccttatgtggcagcggtcgctatttttaagattgccttagtagtaatattctgaatagaaaaggaagtatcatttctttttctgttcaatttattgctatatttgcagtatggatagaaaattaactgaaataggaaccattccagtaacgacttcaatcattgaatcgttgtatccggaacttaagtctgctgacaagaaagtaacctggctcgaaaagcaagggattatcatcagattgaagcggggactttatgtgatcaaccccgaatattcaggaaagactctatcaagtgagttgattgccaatcatctctatacaccttcgtatatttcaatgtctactgcactacgatattatggacttatccccgaggctgtatatgttcatcaatcaatgaccgtaaaacatccccgaagctttcaaactccagtcggcaattatgactacaaatatatttcaagaaaggcatttccgataggagtaaggagtatgaataaaggtgactatgcatttcttattgcatcaccggaaaaggctttgtgtgatttgattgccaattcctcaaaagtcattcttcgttatatgaaggatgtagagacatatcttgagcaggatattcgtatggatatggatgagttctataatatggacgcaaccatatttgaagattatataaaggttggcaaaaaggctgattcaatttcaacacttctaaaattcttaagacgatgaaaaatgaaatattcgacaatatgctctcccgttatgatttaacaacggagcaacataagagaaacgccatatttgaagtgaaccaacaaatgatacttgcaggcctgtatgctgggggcttctttgaatcggctgcgttctatggcggaacttgtctgagaatctttcatggcttgcagcgtttcagtgaggacatggatttctcattgcttgcgcaagatgataccttcgattttacgaaatacttccctgctatcattgatgcctttgcaatggtaggtcgtgaggttgaaataaagaaaaaagataagaagaattttgggaaagtcgaatcggcatttcttaaagataataccgatgtgtatgatgtgactttccaaacagagaagtctataaagataaagattgaagtagatacatgtccaccgttgaacttcaagacggaacaaaagctattgctccaaccacattcatttatgactcgttgtttcacacttccggacctgtttgcaggcaagatgcacgcactggtctatcgtgcatggaagaatagagtcaaaggtcgtgattggtatgactttgaatggtatgtgcgccataatgttccgctggatttcactcatttggcagaacgttgcaagcaattcaacaatgaggatattactctagagttattcaaggagaaactcattgagcgtctctctacagctgatataaaacaagtgaaagaagatgtattgcctttcgtgcgcaatccaaaagaacttgatatatggtcaaatgattatttcattcagttggctgggatggtaagaatggagtaatacaacattaagttttatttaagaaataaagcctaaggtattttttcttattggcgaaggcaatccaagtacggttacacttattcatagtctcataaagtactcagtcttcaaccaataggcataaatcggggatttcaccaaccttattatccaataaatgtaattacataaatcg

SEQ ID NO: 294 - DNA, 5788 bp, Butyricimonas faecihominis
tgaaaaccccataccgtgttgcaaaagccatgcaattcatgacacgaggctacacggaaaacccggaagaaatccttcgctccgccctgttcaaggaagattatcgccagatggtgatcgtcaaggatattgaaatttattctctatgtgaacaccacatgctcccgttcatcggacacgcccacgtggcctatatcccgaacggatacatcaccgggctgagtaaaatcgcacgggtagttgaggccttttccagaaggctccaagtgcaggaaagactgacgaatgacataaaaaattgtatacagaatacactcaatcccctcggcgttgccgtggtcattgaggcccagcacatgtgcatgatgatgcggggtgtgcaaaaacaaaattcggtaacgaccacttccgatttcagcggggcattcgaaaaactcgccacacgggaagagttcatccgattaattagtaacaaatttcattaagaaataaacatgacgagtatgaaaaaagcatttgttttcccgggccaaggagcccaattcgtaggtatgggcaaggacttgtacgagaactcacccgaagcaaaagagttatttgaaaaggcaaatgaaattctgggattccgcatcacggacctgatgttcgagggaaccgacgaagatttaaagcagaccaaagtaactcaaccggcgatattccttcactcggtgattcttgcaaaatcgttaaacgagaaaccggacatggtagcgggtcactcgctgggagaattctccgcacttgtcgccaatgggacactttctttcgaagatggcttgcgtcttgttcacgccagagcgcttgccatgcaaaaagcatgcgaggcgaatccatccacgatggccgccatcctcgggttaccggatgaaactgtcgaaaacattttagctgaaatagatgatgtagttgttcctgccaattacaactgtccgggacaaatcgttatttccggaacgacacaaggaattgccaccgcttgcgaaaaattaaaagcagccggggccaaacgggctctcccgttaaaagtagggggtgccttccactctccgctgatggaacctgcccggaaagaactggccgatgccatcatgaacacccatttctcacaaccttcatgcccggtttaccagaacgtgaacgcacaaccggtgtctgatccggaggtgatcaaaaagaacttgattgcccagttaacagcatctgtacgttggactcaaaccgtacaaaatatgctggctgacggggcatcatctttcttagaaatcggtcccggaaacgtacttcaaggattgatcaaaaaagtaagtactgaagttgaaacagcaggaatgcagtagattttgtttaaaacaaaatctactggttacaagttacaggttagcaagttacaagttcatgaatcttacatatcaagaaccgcctaactcataaacttgtaacctgcagagccgaaggatcaacctgaaacttgtaacaattttaaagcctcccatgggaggctttaaaattttatttatatctttgaacaaagataattcaagataaaaccgggatatgccaaacaataaaacaaaaaaacaccgtacgattcaatacgtgtttaaaatcagtacgatcatcattatttgtgggctcattgtcttgttacttcctaaaatagagggctttaaatattcttaccaaaaaggaatgccttggaaatacgagacattgatcgcacccttagattttccgctgcataaaagcgccgaggaacttgccgctgacattgaaaaaatcaaagaagagcaagcccccattttcaacttcaaagaaacaaatattgaagcccagatcaacaaactttcagaaaaaataaatacatatcgaaccgcgaacaacggaaaagatatggataaaatcattcaacaactacgggaaatttattccaaaggcatcctactgatgccggaaaaaatggatccggctaaaatcaaaaatattcttatcgtcaagaacaacattgccttcgacgaaaagttttccaacgtgtacacgctaaagcaagcctacgaaacattggttaaatacatcgagagcctgcacctttctaaatcaacagaggaaggaatactcagtctaggcctgaacaattacatcaatccgaacctcgaatacgatgccgggaaaacgggccttgccattgaaaccagcgtgaaaagcatcacaccaacccaaggaatggtcaatcggggagatattatcatatccaaaaacgacctagtaacccccgaaaaatataaagttttggaatctttccggatagaacacgagcaaactttgggatcaaccattgaccgagtccggatctcggtagctcaaaccgtgttgaccttgatcgccatcatgagtttctccatcttcctctatgtctcccggaaacggctattctacaacaacagggatttctttttcctgtatagtatgtttttgctaaccattgcccttggaagtatcagctacttccaacacatcaatatcctcacgatccccgttttattcttcccaatcatcgtgaacattttattcgggacaagaccggctctttatctattgatcggtacaagcttgctggtttcctactacgctcccaacaattatatgtacttcttcatgcaaatatcagccgggatcgtagccatgttcagcctctcacacctgcaacgccgttctcaactatttattgcactaggtctgatattcttaacttatatattggtatacggggctttcacgctcatacaagaggggaccctcgcacccaaacatctgttcgctgtcgtgttcctcatcataaataccggcttgttaagcttaatttatcccgccctttacttggtagaacgcctcttcgggtacacgtctgaaatcagtttactggaatactctaacccgaatcacccggccttacgcaacctgacgaaaaaggccccgggaacattccaacactctctaatggttgccaacctagcagaagaagcgatttatcacatcgggggtagcccgcttttagcccgtaccggggcattataccatgacatcgggaaaacatacaacccgatcatgttcgtggagaatcaaacaggaggcttaaacccgcacgattctctggattttgacgaaagcgcccagatcattatcaaacacgtgacacaaggcttggaacttgccaataaatacaaattaccggaagtcctcaaagactttatccgcacacatcacggtaaaagtaaagtaaaatacttctactactcattcaaaaacaaatacccggacaaggaaatagatgaatccctgttcacttatcccggtccggaccccgtgagaaaagagtgtgccgtagtcatgatggccgatggagtggaagcagcctcccgggctctggaaataaaggatgaagaaaacctgaccaaactggtgaataacttgattgacggccttcttcaagatggacggttctctaacgcagacttgacattcaaagacatttccacggtgaaacgagtatttacagaaatgcttgtaaacgtgtaccatgcccgtatagcgtacccgaaattacaaaccaaagcataaccctcaagacctaaaatatatgacacaaaaaccaataaccatcaaagacattgcagagaaattaaatatatccgtgtctaccgtctcccgcgcgctaaaagacaatcacgaaatcagcgcgcaaacacgtaaaaccgtgcaggaactggcgaaacaactcggttacaaacccaatcccatcgccgtagccctgaaaacccataaaagtcattcgatcggagttattgttccccagatcgttagtactttttttgccacagtagtgaaaacgattgaggaagtagcagacggtcacggctacaacgttttagtcatatcctcgaatgaaagtttccaaaaagaacaaaaaagcgtggaagtactcatggccaaccgggcggatggaattatccttgccttatcacacgagacgaaagactatgaacacattaaaatgatacaggaatccggaacacctatcgtgctgttcgaccgtaccacgaatgaactcaacgtgtcacgggtcgtgacggacggtgtcacggctgcattccaagccgttcaacacctcgtttccgaaggttgcaaaaaaatagctttattatgcggtcccgaaaacgttgccatcggaggcaatcgcatggaaggctacgaaaaagccatggaggccaaccatcttccggctaaaacagaactaatctggcactgttccgatttcacggtagaggcaggaaaagaagcgacacgccagttactctcccggaaagagagaccagatgccatattcggcatcacagacgatttggccatcggggctattgaggcgatcaaggaaaaaggacttaacatcccggaagacattgccgttgtcggtttctccaacacgaaacgctcacgctacatgaacccgacggtaagttccatcaaccagttcccggaaaaaatcggacgggctgcggccgaacttctgtttgatcagattctgaacagcaagcatgcgcagattaaaaaagaaatcattaactgcgaactgatcgttagagaatcttcggacagactatgtaaaacacgataaacgctaacataattgctaaaatcttaacaatataaattaaaaccttgttaattactcggttaaagattattaaacctaaaaatcaatggtttgaatgactatttttgtagaaattaataacagcagcccatggacgtagttgtggaaaatctgacgaaatctttcgaaaatcagaaagccgtggattcaatttcttttaaagcaaaaagaggtgaaatccttggattcctagggcctaacggtgcgggtaaaacaaccactatgaagatcatggcagggctactgacaccggatttcggaaatataacattcggggactattcgatttggaaacaagcaggtaaaataaaaaacatcatcggttacctcccggaacgtaaccctttgtatgacgaaatgaacgtgattgatttcctattttttatttcaaaacttcacaacattcctaaatacaaaatcacgtcacgtgttttagatatgattcgtttatgcgggttagacaacgataaacacaaacagatcggagaattatccaagggcttccgccaacgggtaggaattgcccaagcattaattcacgatccggaagtggtcattctcgatgaaccgacaacaggacttgaccccaaccagatttttggaatccgtaaaatcatcaaagaaatcggggaagaaaaaacagttattttaagttcccacattctttctgaaatcgaaacaacttgcgatcaagtgatgatcatgagtaacgggaaaatcgtggccaatggcacgacatccgaacttcgtcgcaaatcggatgcagaatattgcctgaaaataggcatcaagggtggggaaacaaccgacattcacgaggcactgaacgatctgccgggagtactccatatcgagattattcataaacagaatttcgaactccaatgtaaacccgatgtagaaatcgaaaagtcaatctttaacctttgtcaaaaaaacaactggtacatcagcgagttaactcccgtacaaaccagattggaagatatatttcgtaaagttacacaaaatgaataattcatgggtgcagttaaagtt

SEQ ID NO: 295 - DNA, 5783 bp, Butyricimonas faecihominis
atattatataattctaggattattggtcgggttggttgcttgtcaagagaatgataaaacagatttcgatagtaacggggctgtttattttcaggtaaatccgagttcatggagtgatacgagggatagtatcgtgtactcttttgcggggaaagacggagattcgcagactttgaacgtacaggtcaacctgatgggggaggccgtgaattacgaacgtcatgttcgggtggttgttaattcgggaaagacgacggctcaagaagggatacattatgcggcgttggaggaagagtatattcttccggcggaggcttttagtatgaatatacccgtcgtcttgtataataaagatcctcgtttggaggaagaggcttttcagttagttctggacttggaaccttcggatgatttggaactggggcttacagcccgtacaactgtgcgggtaattatttccaatgtcctgacacgtccttattactgggaagatatgtacatggatggcattttcggaccttattctagggtaaaacatgaatattgcattcggaagttagggagggatttcccacaagattcagatgagtatagaacaaattatggtatttggaaagcgtatgggaaatatatggataatttcttctatgaaaattatccgattttagatgaaaatggccttgctatcgaaccttggttgtaaaattaacatggaaaatgatgaaaaagattcaattaattatatggagtattctggtactttgcgtgggagcctgtacggaagataaaggggattatgattataccccgttgaatgatttagttgttcaggggatagagaaagactatactgtggaacaattctcatccttgaaaatcccggtgacaataaccgcaaaagatggattttcggaggatcattacgagtatttgtggtatatctggcgagtaaataatgccgcagacccggatacgctttctttcaaaaaggatttggatattgaagtcgaatctgttaccggggagtatacgatgagatatattgtaacagacaaggaaaccggagtttcctattctgtagaaacagacctgacgattgtcaattcctattccaagggattaatggtattgagtgaggtagaaggtaatgctaacgtgacatttatcaatgttgtgaatacggtcacggaggatgcgtatgagaaggtgaacggggaagtagccggaaggtctccccggggaattttttacacgggcgagggcgagtttaccaaaggattggttgtcatatcaacaggtgatggatcaaaggtgatagagcctacggatttttcttacatgatggatttctccgagatgttttattttgccccggatccttgcgtgatggagtgtctgtgtaaaaatatgtatgggtataacgaatatgtcatcatgagtgggagagtatatactcgtaatctttcttttgttgaggatatgtttgtcaagtatgatccgcaggtgaaaggagattatgaggctgcaccattttccatgtacgaatcgaacgatccttttttctatgaccagaaaggtaagcggtttatatacgatgattacgggaaaatgatttccgtggaatcggcctcaggtgctttcaatccggcggcaatggaggccacgatggtttatggggtagctttcgaggataacgtgcgggcggtgatggaggatgctgatgggcatcatttcgtgattgcggcacagaaaagagtggaatacgatgatgatttttataattcttatattcgggttatcccgattcggaaggtcgatttgaaccagaccgatattggggaggctacctgttttgccgtttcctctaaagatattgatttcctttattatggctatcagaacaaaattgtttgcatgagtacagtgacgggaaacgtgttggcaacgtatgacggttttgaggaaggaaacaaaatagattatattgaatttgaccgttccgagaaccctaatcgtttgtacgtgggagtaagtaatggctccgggaaagcaaaatccggttcgatttattatctacggatgagtagtaatgggagtctggaggaggaaaatcattttaataatatatgtggtagagtcgttgattttgaatataataaataagatgaatcggttgtgtattttagcatttttaatcgtttgtatggcttgtcaatcaagccatcagacgattctgaaaggagtggttaatgataatggagctttgatacggattgccgtgcaaggtagtttaaaacgagacactctgaaagtgaatgagagaggggaatttgagtacattcctatggaaacacagaatggagtgatttatgaattgtccgtgaaaggttataatccttggataccggtatttttagcaaaaggaagtcgtgtgaatatagaattgacattactacctcaacaatcgatggagattagtttttctggagattgtgaaaaagagaataaatatctgtttgctttacgatctattgaaaattcacaggaatggtattctcccgagatatctgctcttaaattcaaagatttcaagttgaaagtcgatgaaaaagaaaaagaattaagaattttaggaaatcagattacgaataaaaaaaatcgtgagcaattggcaaaaaaagcctatctaaatcttcaaaatcagcggttttcatggtacctgtctcatgtaggagatagtgtaaaagatgtggattttttggattttgtaaaatccataaattggaacgattcgttgagttgtaacgaagaacttttggaatatatgattgggtggagtatgagtcaagtgacagacttggattggaatgattttccgaaaaaaagtttagaaattatcggatcgctggtgactgaccaagagatgaaaaatcgatatgttacttccagatttctaagctatttgaacaggcccggcgtgttaagtttacaggatgcctacgagtactataattccatatgcacggatgaaatattaaaggaaacagcacgtggagagtataacgaatatatccgagtgaatgggaatttgatgagaggaaaagtagccccagattttgagttaaccggggaagacgggaaaaaatataaattatcggattttaggggaaaatttttgttgttagatgtttgggcaacttggtgcgctccttgccgtgatgagctaccttatatggcgaaattgaaagagcattttaaaaaagatgatcaagtggaaattattagtatagcaattgataataacgtgaatgtatggaaaaaatttttagaaaaggagaaaccgacttggaaacagtatattgtggacaaaaaaacgaatgattttttaggaaaagagtatcgaattgaaggtatacctcatttcatgttgctagaccgggaggggcgttttattgcgtattcatttgttcgtccttctgaaccggagtgtattacattattggaaaaatatttaaatcaaatacagtgatgaaaaacttgaaattatttgtgatattagttgtctctttattagtgggaattgattgtatggcaaaaaatcaagattctggttatattcgagggagaatctatgattttgttggtgggaacgtgacagtgatttattatgtgggaggaggggtaaaaatgatcgatactcttcaagttagtgatgttggagaatttgtttataacgtggatgtggaaaagccgattcgagcttttttatcgtttgagaagtatgcttgttttgtggctcttttccttgaaaatgggatgaaggctgatctgacaatttcatttcataaagaaaagaatgaagaggatgatgcgtatgtcccggaagtaaattatgttggggataatgcagattgtttttgttttatgaaagaattcgaccgttggcaatacgatgcttggccttttgagatgctggatacgatgagttttgccgaatacagagaggcttatctggaagatgttgatagagtaaagtctaatttggtaaagataaaaagcttggcttttaaaagaatgatgatggatgtgattgatcaatttattccggtatatttattccgtcatgcttggtcaaaaccccgggaagacgctgattttgttcgttgggtagaggcattcgaccggaatgatccggataatatggagatggccgagagatatgttcgctggtatcttcaacgtcatccggcaggaaaagaacaaaatagagttgtgtatcatttgaatgccttgactcaaatattcacgaatcaggaaatcattaatgacatggccaatagtcttgttgattattatttaaaacaagctccaaaagatatgaccgaggtgttcgaggtttataaacgggtttccactgacacggtagatcactccgagatgcagaaagtgtatgatcactatataaacatgatgcccggtgcgccggctattgattttgagatgacagatgttaatgggaaaaaatgtcatttgtccgattttaaggggaaagctgtttatattgacgtgtgggctacttggtgcggaccatgttgcatggaaattccttatatggagaaattggtgaaacattatgccaagaataagaagattgaatttctgagtatctcgttggacgagaatcaaaagaaatggaaaaagaaactggcagcagataaaccggaatggaaacaatttatttgcccggataatttccaatcgaccctatgtcaagagtatgatattgatggaattccccgtttcttattcttcgataagaaaggaagaattatttccttggatgctccaagaccctcttcttccaagattatagagtatattaatcagcatattaaataataggtgatgtatcccttatccccggcttttgccggggatatagtggcccgaaatattattcttgagcatgaataggctcgttattggtccggttgacgggatattcgagtatgttatttttgttttctatctgttaaaatggtggcgataatcgggcgagcatttagatcccagtcgggattcgccttcggcgagttacaggttagcaagtgacaggtttcatcaacttttatcttttagttttcctaaggatggaagagggtacttccgggatactcttggatcacttccggttcattctcggtctttggttgcttgtgagcgagagtgtaacgaaggtgtaccgagagtgaaccgaaggtgatccctatcttctacggttcttccccggtatttccctaggaattgcattttgacagatctcgttattcgtgtctgaaacatcaagatttccaagctaaatgtacgtatttggacgggggaggaggcgctacattgaaacattggagcgtgttctcacggcggttttctctctcgtgtaatgctatactcgtattattcagggatataaatctgttcttatatcgaactcacgttaatataaattgatattcaagtaaaatattcatacttttgcttgtagaagtttaaacacgagaataatcatgagtacgagagcaagtattgtattaaagttgaaagacgaagatattggtaaaaagatgaaatttgaaccttcacgtctaccacttggaattacttgtgatatggctggggtggataaagtagagtgggttgaattgtctaaaaggtacattatgatctatcataattacgatagttatccatcgggaatgggcgtgtatttgtattatatctataat

SEQ ID NO: 296 - DNA, 5768 bp, Butyricimonas faecihominis
ttattaaatcgatttgttgtgtttttttatatgctttactgccaatttcgtctgttttggggcaggaacaggactataaaaaaacgagggtaacgctgaatgtgaaggatatgaaattgaacgacgtgcttgatacgctggcatcagtagctaaagtacggttcttttataatcattcacaaatagatgttaataagaaagtgtctttggatgtgaaggatagcgagttggattatgtgttgatgttagccttgggggatcaacccgtgtccgtggagtaccagatgaatcgtgtcgtggttttgaagtaccaaaaaccgacacagggagtaactatttataagattaacgggactgttattgatgcgtccacgaaagaacctcttccgggagcgagtattatcctgaaagagaataaggggatgggagtggtgacggattttgacgggaagttttttatcgaggtgcctcagggaacatctgccttgttgatttcattcgtcggctacgaggaaaaaacgctcacggtgaccggggatatgaaagatctggagatcaagttgacggcgaaaaccacggagatcgaagacgtggtggtgacgggtatggcacctcgtaaggtggaaagtttctcgggaggttatgtttccgtgaaagggagcgagttgaagaagataagcccgaataatctgttgaaggctttacaggtttttgatccgagtttccgtatcgtggaaaataataatgccggttcgaacccgaatgccatgccggaattccgcttgcggggtgatgtgcagctaggaaatggcggggtggatgccaatagcatggagatgatgatgggggattattctcaacgcccgaatatgccgcttttcgtgttggatgggtttgaaaccaccttgcaacggattgttgacttggacccggaacgtgtggaatccattactattttgaaggatgctgcagcaacggcaatttacggttcgaaagcctctaacggggtgcttgtcgtggaaacgaagaaaccccttccgggagcgttgaatatttcatatagtatgaatatgggtatttccgtgcctgatttgtcggattataatttgatggatgcggaagagaagttggaatacgagcggatggccggggtattcagcacgacaagccagttgaactattacaataaatataaagaagaaattttaagaggggttgacacgtactggttgtcagagcctttgcggacggccgtcactcaccgccacacgttgacaatggaaggtggagatgaggcgttaagatataacttgggaataaattattcaagagaaccgggagtgatgaaggaatccgggcgtaacagcatgggtttgaatctatctcttcaataccgtcggaaaaaatggaatatccagaatcaattgagcctgtcgaacgtgagaggggataattctccctacggttctttcagtcaatacacgaaattaaacccgtattaccggaaaacggatgagaacggtcgttataccagtcttctggaccggaagaagttaccgggtgaagggggaggaacggtggatattgtgaacccgttgtataatttgttgtggaaatataaggatttcacggagaattttagtgtcgtggataattttaatatcgagtgtgcggttctggaaaatctccgggtgtcagcgggagcgtccatcacgaaaggtacttcccggatggaggttttcaaatccatgaatcatacggatttcttgccagagacagatttgaccagaaaagggtcatacagcaagagtacaggggataatgtttcttggagcgtgaatgcttctgtaagttataactacacgaaggataagcatttgttaagtttgttcggacgttggaacgtggatgagaacaagaataatagtgtagacttgtcggctatgggttttccgaatgataatatggatgactttttgtttgcttacgagatggaagaccgggtgagcgggtctgaatcgacttcccggacggtcggaattatcgggcagcttagttatatgtatgatatgcgtttctcggtagactttagtattcgtggggatctttcctcgcaattcggggcgaacacgggtatggctcctttctgggcagttggggctcgttggaatgtacaccgggaaaaatggttgcaaaataccttcatctcaaacttggtgttacgcggatcatacggtatcacgggatcacaaagttattccccttaccaggcgaaagagacttacacgtacgatgatttgttgttcccctatccgtcttcggatatattgggagcgcagttgaaaggtatgggtaacccggatttgggatggtccacgacgaagaatcgtagttttgcgatggaacttggactatggaatagtcgggtaaatgcttccttctcgtattacaataattacacggatgagttgctgttggattataatatggctccttctaccggatttgcgagcaaaaccatgaacgtgggagctgttgaaaacgagggatatgatatttcgttaagcgtgatgcctattcaggattacgaaagacagattcaatggagtatttcaatgaacggttcgcataatcgtaacgtgatcaagaagatttcgaacgagatgaaggctatgaatcagaaaaatctggagaaaaagaacgggagtccggaagctatttacgaggaagggaaatctaccacccagttgttcgtggttccttccttgggaattgatccggccacggggcaagaagtattcttaacccgcaacggggagaaaacctatatctgggatccgctggataaagtggccatcggtgacacggaaccgaaattgagaggttctatttcttccgcatttacgtataagaattggagtgtttctctggcttgttcgtacgagttgggtgcatggtggtataaccagacgctggtggataaaatagaaaattcaagtgctgcttataacttggatcgccgggcgttgtcacaccgttggagtgagaataaccggaatgcccgttataaagcgataacgatgacgaaccaagatacgggaatgagcagccgtttcgctcagaaacggaatgaattgtcgtttacgtctttggcaatcggttatcgttttgacccgaagaattttaaattcttgcaagcgtgccggattgccagtatgtcgctgaacgctacgatggaggaactaggtagaatttcatcgatcagaacggaaaggggattggattacccgtttgccagaacgttcaacgtgtcgttgtcggtattgtttaattaaaatgaggaggagtacgagatgaaaaacttattattatcagcaatttgcatcgtttcgttgttcttgtcttcctgtcagaattggattgatgtgaatccgaaaacggatattgaggccgaagagttctttacttcagaggacgggttcaagagtgcgttgaccgggttatatagcatgatggtactggaaaagtcatacgggagacagatgacgtttgatttcgtggagaaattggttcaacgatatgataattacccggcaggaaccgtgacggatgaggaacgggctgctatctataaatatggtgaaacgacaagttctaaaaatgcgattgccgagatctggttgaagttatataacgagatcgcaaatatcaataatttcctgcaataccttgagacaaacggagatgtgatcgtgacggaggggtatcgtgatctgatgaagggggaggctcttggcttacgtgcgtttcattattttgatctgttgcgtttgtggggaccgatttattcccaggattcgacaaaagcgtgtattccttaccgggagcaatttaattcggaaagcgcacccttgatggcagctaacgaggtgatgaaacgtattgttgccgatttgaaagctgccgaggaattgttgaagaatgatccgatgaattatgagaatgttacagacgagcctttcatcggttatcgcaagcatcgtatgaacaagtatgccgttaaggctatgttggcccgcgtatatttgtacatgggaaataagacgcaggcagcgaactatgcccgggaggtaattaatgattccgggttgcggcttgtacgtgataaccgggaagacgtgtcttcgtacggggagactattttcggactttccatgtataatatggaagaaaagttagcggcttattggaaagatgccacgactttcgacacgcagtattatatttctcgaaccaatatttcatccgtgtttgaaaccaattcgggcattgggttgaatgatatgcgttatcgttcgaattatggctttattcatacttctgctaatctttttctttgtcgcaaatatttaggtgccagcggaatgtatggagagaaaatcccgttgatccgtttggcagaaatgtactatatactggcagaatcggttgctttgtctgaatgtggacaatatattaacgcggtgaagaacgccaggggtatttccagggcatacgatgttggtacggatgtgaccgaggaacaacgtttggaagaattgaacaaggagtatcaaaaggaattctttgctgaagggcagtatttctacttcttgaagaggcataacatgaaaaccttctaccgttgtcccgtggagaatttttcagcttacgtgcttccggttccggatgatgagaaaacgtatggtgaggctgagtaatcatttaaacgcaaagtatagaatatgagaaatatatatgttattataagtgttttgttattctctttagcggcgtgtcaggaaaaggagattcccggctactcgatagaacgggatggtttgcaattcgattatgacacgaatgaaatgagagtgacggttgattttatgcaggagtatagaattgatacgatctggtattccggagtcccgggcgagggatcttattacacgttaagatggtacaccggtgattccttactgaaaaagaaaattcagttgaatttatccatgatggggcatgccgtggattatgaccgggaattccggttgaaggcggtggtggcggaaggtacggatgaagtggcaaaaactttcttggagtttgagccttcgtacgtgttccgtgccgggcaattgaaagacacggtggaagtgtacgtgttgaatccgggtgctagggtgaattacacgatcgggattgttttagatacggagaattccgacccttcattggaattgggagcaatggaaaagaatgaatatcaagtgctgttaagtaatcgttatccgcagccgtctcaatgggatgcgagtgtcgtcggggagtttagcgaggacaagtatgcgttcatggtgaccattttgggaaaattgtatgatcagtatgctgattggagtactgatcttgccacgttgtcagaggctttgaacaaatacaatgcttcacatcccggtgaagagaaagattttacattcccggaacctccggctcctgtttggtggggtacgtttgaatacataatcggagaatattctatggccaagaatcaatttatgcaggaggctttaggggatgattataacaatttcggttattgggatataaaagatccggaaggaatgaaccaacgtttgcgggatgcctatgacgaatataacgctgaacacccggatgatccgctaccgttcgaacagttcccggttatatgagagaaagattattct

SEQ ID NO: 297 - DNA, 5759 bp, Butyricimonas faecihominis
cttttattaacggtttcgagcattttttacgtacggtccggggatgttgtacaaatacaatttggttgtatatgattggagtaaagcatattatctccgttgcacgaaatgaagggttacttgttgttaatccatttgcaggttatatgatcagtcctgaacaagtggatcggggctttctttcggaagaggaactacaattgttaatgaaagcccccatgaaaaataaatcctatgagcttgtgcgtgatctatttgtttttgcggcatttacgggattggcctattccgatattaaaaatttaaccaagaataacctgcaaacattcttggatggccatttatggatcatcacgcgtaggcagaaaacaaatgtcgattcgaatatccgactattggatgtacccaaacgaataattgcaaaatatgaaggcaagaccggggatgatcgtttatttgccgttccaagtaactggtcatgtaataatatattaaaaaacatcggtaaacaatgcggattcaagattaaacttacttttcacgtgggacgtcacaccttttcaacttcgcttacattggcgaaaggaatgcccattgaaaccgtaagtcgaattctaggccacacaaatataaaaaccacgcagatttatgcaaagataacgaacgagaaggtgagcagggatatggaacttctttcacagaaattagctggattagaaaaacaactaacagcgacaatctaggtttgttgtgaacaacgaaaaggatgaataaatttgagaggttttatccatcctttttatgatgcaaaatacaagttagaacagctactaaggcattacctctttatcaatcgaattttattaatattcttgtaattaagttattaggtagttgtaaatggtttttacaataaaatctaataacatgtggaattttttaaaaccagcacctcacaaggatttattaccggaaggtaagatcgactcgacttacaagagcctgcgttggcaggtcttcgtcggcatcttcatcggttacgccggctattacatcgtgcggaagaacttctcgatggcgatgccgtttctaacagaccccgccggaccttacgggttcgacaagggatcgctgagtatcgtgttgtcgttgaacgcggtggcctacgccctgtcgaagttcttgatggggagcgtttcggatcgtagcaacgcccgcgtgttccttcctctaggattggcactggcggccctgtccatgatgttcatggccgtgccgatcgagctgttcggggcaagcacgacctccatcgtgatcatggcggtgttgaacttcctagtcgggtggtttaacgggatgggatggcctccctgcggccgcgtgatgactcactggttctccgtgaaggagcgcgggacgaaaatgtctatctggaattgcgcccataacgtgggtggcgctctcgtgggcccgatggccgtgtacggcgccatgtggttcgggtcgtggttctacggggtggacagttcaaagtactttatcattggtacctatattttcccggcggcggtggccctgttcgtggccctgctggcgtacgtgttgattcgtgacaccccgcagtcctgcgggttaccgacgatagagaaatggcggaacgattaccccaagaattacagcgagaaacaggaagaggtcctcaccacgagagagattttcttcaagtacgtgctgaataacaagatgttgtggtttatcgccatcgctaacgccttcgtttacatggttcgttacggttgtctggactgggccccgacctacttgaaggaggcgcaagggtatgatattaaagaggccggctgggcttatttcgcttacgagttcgcggctatccccgggaccctcgtttgcgggtggttgagtgacgtggtgttcaagggacgccgcgctatcacgacgatcatattcatggccttggtggctttgtttatcttcctttactggcaattctcggataactacatgattgtcacgctatccttgatcgccatcggtttcttcatctacggcccggtgatgcttatcggggtgcaggctcttgacctcgctcccaagaacgcggccgggacatcggccgggttgaccgggttcttcgggtacttcttcgggacggctatcctggcgaacgtggtgatgggatacgtggcggaaagttcgttcgggtgggacgggacgttcgtgctgttgcttatcgcttgtgccttgtcgatcgttttcgtcggctttacttacaaggaggaacaataccttgtgcaaaatagaaaataatgatgccttattgaggtgaagaaatagaattattctgatcaacaataaaaaataaattgtatgaatacaaaacatttgacgaaaggaatagtggttatattgttgctattcattacgtcctcgatttacgcgcagacttaccgggagatcaaagggtggtcaaaggaaattaatgagagaattgaaacattcttgaatacgactttaaccatgaatattcgtaaagtagcggtattcgacggggatggaactgtgatcgggcaagcaccacactatttggcggatgaagctttatatcgttatgccgataaatattataagggcaaaaatgataaggtttccaaggaaaaaatggctattttgaatcggatggtaaaagacggtaataacgtggggaaggtttatgtcgaagatcgtgcccactttttggcgggaatgactccggaagaagtggcaaagttggggtatgattgctatgtggagtcatatcaaggaaagttttacccggaaatgaaacagcttatagctaatttgaaagagtatggatttgaggtttggatattgacagcttctcccgagtttttatatcaaaaatttttatcagaggaattgggaatccccgaagtaaatattctcgggatgaagtctgtcgtggtagatggggtgttgacaaatgagatcgtgttaccgattccgcaagatgatgggaaagcgaatgttatcccgactttcattaaaactcgtccacttgtagtggggggaaatagccggggagacatggatatgctaaaccagtcttgtggtttgaagattgtggtgaacccggatgataaaactgtccgggggccggaagacggtccgatgcatggtctaacggtgaaagggtactgggaaaaagaaggagccgttattgttcggtgcaatgatgtacgagatccgaaagtgcgtttccatacttcagagtggggaatcagagaaaatgtgattaatcctaaagaataattctgtgaagaattatcccgcatagttacaataaacttaatttatgttattatgaaaaaaaactatttattaaatgtattggtgttatgttgtgccctttttgtatgtacaattgcccgggccgagtctgataaagacgaaccttctaacacgaaaagcgaggtcgcacaagccaataacgacgaccttacaaaacaagtaaataaacttctttcgatattgcctaaattctctggttatattcaaaccggttataactggggggacaagaatggggataacagatcatcattccaattgaaacgtatgcgtttgatcattgataaaaaagtttcaaaaacctttgatttccgtgcccagttggagtgtttctccggatcggttgataactctgcctacaagaaaaaagtgatcacggtaatggacgcttttgttaatgctcatatcactgatgctttgcatttccgtgcaggtcaatattatttgccgcttggtttcgagaattatgatatttctccgtctactttagagaccgtggatttctcgaacatctgttaccgtatggtgtgtcgtaatgcgatctcttctgcagatcttattgattatggtcgtgatcttggagtgatggcttatggagaccttttcaaaagcaaagatcaaaaatttagctatctgagttatcagttatcattgacgaacggttatctcccgacattgaacgatgacaataaatcgaaagatcttgtgggtcgtattacaatccgtccggtagagaaattgcgtatcatcggttgttacaattggggagaatataaaggtttgaacgaaaatggagatgcgaaggattatcttccgatgaatcgttttatcaccggtgcttggtattatgatccgaatggtcttgatgttcgtgcagaatacggccatattcaaagtgatgatgctaacgtgaaggaagatggtttttatgtgcttgcagcgtataagattggtaagttcttaccggttgtacgttatgatatgtaccgtgacaaagcagccaagacttctgcaaacaacaaggataacttccttttaggttgtacctatgaaataatcaaggatgttaagttccaggtaaattataccatttcggcttatcctgacaaggtaaaagatgctggaacaagaactggtacgggtaatagcttgcaaatcatgtgtcttcttaaattctaataatacttaatctttttaccaacaaattaaattattggattatgaataaattatttttcgctctggcattactttttgtaggaatgtctgcaaatgcccaacatctgggaactgagtatcgattgaaaagagttattcccgtggcaggacgtcaaggaattgctatcgacagtaactattattatgtttccgacaccaaagttctttataagtatgataagcaaggtaatcttgtcatgaagaacgatcaaccgttccagaatcctaaaattgctaaccactttggggatattgacgtgtacaatggagagatctattgcggtatcgagaaattcgaatacggacgtggttacaatattgccgtgtcaatttatgacgcagagactttaaaatggaaacgtgatcttccttggtctcctgaatcaggacaggtagaggtgtctgggcttgctgttgatcgtgagaaaaatatggtttggatgtctgactgggtggatagtcgttacgtgtattgctatagtcttgaaacaggacaatactacacgaaaatgcaatgtcgtccgactccctactggtgccaaggaatctttatcgctgacgggaaaatgcttttcacttcagatgatggagaatctttatataatattccagataatatttatgttgctgacattacggaagtgcatttcaccggtttgcaggaaggaactgaagtggttaaagatactccgttcagtgtgaaacttgacaaaaacggaaagcctgtaatgcgtaaaggtaaaattgctgcaggggcaaaagccggaagagttgagttgtttcgtgagatgagtgatttccgtcgttctggagagattgaaggtctttcaattgacccggtaaatgatgatttggttgttttaaataatcgtggtacattaatcgttcttggtatgtcacaaggtccgttcaaggaagaagggtataccggagaaattcatgaactttatatctacgagaaagtaaaataattcttagcgaaggaatctgagttagaaatagacgatccccgaaggttttataaaaaactctggggatcgtccttttttatgttcgactttagaaatcacgagtagttatttgatcttacattgaattacaatgtcctgtatgataaggatttgtttagtgtaactatctgaatgatagtataataaaacaaaaaagcagcc

SEQ ID NO: 298 - DNA, 5740 bp, Butyricimonas faecihominis
ttgttaggaagtatcattgtacttctgttattttcttgtgtggctaatgcgcaggatcgcagaccttttcacatcattccattggtgccggttgtcggtcaggatgtgaagttcacgtatgacaattcgttgacgactctggctgacgaagaaacggtctacggaacggtttattactgggagaatttgcgttggagggcagaggatttgaaattggtgaagaatgatacggcatgggaagcaacctgtcgagtgcctgaaaattgtgcgttggtatcatgtaaattttatgcgggggacaaaaaggatacagggggacgttctacttacacgacaatgacctttaacaagaacaggcagaatttaccgacggcttacatggcgtggggaatgttgcggaacaagacgttggagtctttaccggggtattgtgaagaggatgcgtatattgatgatgaagttatgcgtttttggctgaaccaacagcttttgaaagatcccggagctaggaaatatgtgttctactatgcggcaaaattgttgaataaaatgataccgggagagaaacacgaacagatgttgggtgacgtggattttatactgaacttaccggatgcggatgaagagacgttgttgaaggcacttgaagtcgctaagaatatcgtgaaagacagtacgaaagcggcggcagtggaagctcggattttgaaagattacccgaatgggattttggctagggatcaagagatctggcgaatcttcagaattatggatgctgatgcgaaagctcctgaattagatgcttttctgaaacgtttcccgacggaaaagtttcaagatatagaaacggaaacgtcatcaatgtatctgggtaagatctttcaagcggtagtttatcaaccaattatcaagaagaatgattatagtttgttgtataaatatattcacgatgttcctcatctttatttactgactttctactggcacatggtacaagtaccgttaaacacgaatcagagaacaccggaacaggtgttaccttttgccaaagctatttataacgaggtgatgactcgtcctcaagtaggtgcagatcgagtatattctgaacgggagtggaaagattatctgatcacgagggggaaagatatgattctgaaacatgcgttcgtgttggatgctaccggttcttctgccgaggcactggagttgatggaagaaattaaagggaaatataattttaaatcggcagaatataacaatcaatatgttcatttattggagaagaatggctatcaatcgatggtaattcccacgatcgtggctagtgtacgggaagatgcggttactcccgaaatgttggaaatcttgcggaaagattacgtgaaacaacataaaaacgataaagattttgaggcttatgtcagttcgttgaaatcacaagagaaacaacaagaattgcaaaaacatttgcaggagacgatgattaacaaggatattgagctttttgccatggaagatctggatggtaaaaaggttgatctttcaaagatgaaggggaaaattatcgtgttggatttctgggctacttggtgctctccttgtaaagcctctttgccgggaatgcagatggctgtaaataaatacaagaatgatccgaacgtggtgtttttctttatttccacgatggagacggcggctgattttaaagaacagattcggaaattcatgaaggagcataactacacgttgaaggtactttgtgataacgtgaacccgaaaacgaaaaagcaatcggctgtttatgatacttattcaaaggcatttaagttctctggtatccctcataaaatgattattgacgggaacggaaaattgcgttggagcattaacggttatatgggaagtccttcggctttggcagaggaaatgaaccttatgatagagatgttgaaagcggaataatcggcaagattcattcgatgggttaggatttagaacagggtgaatgaatccctgtctaaatcctaattttatgtccttaatctaaccgttttcaaactctgataataccctgttaatggcttacagacgagatatagccgagttaaagctgagataaagccgagttcatgtcctctttgtttttgggaggtatgttttttgtttcttttgtttttactgatattcagatcttctggggatttaaacccttgtaattgaaaaggagctgtccaaaaagtcattttatttcaaaaaactcctccgtcacgtgccttctcctctataaacagagaataagctgtcgactgtaagtatttcagctctccctctgtttatagagggagtacggcgaagccgggagggagtttgaaaaatgactttttggacagcccattttattctgtctatggtctgattattttattttcggtctttttgtacattttcttgtaaccaatcccccatgatttgcagggcttcttctgaaaacacgtcttccagatcgggaatttcttcccgggtacactctttacagcgctggaacatgtggttcaggccggggagttccacgatcttgtattgtgtgtttccgcctttatccagtaattgcttgatggattccaagttttctttggcgggaaccatgatgtctttgtccccgtttaatgccagcacgggtttacggatgcgggggatataattttccggatcataattgatcatctccctgtaccaacgtccttgtgcctgatgcaggtaacgactgaaaaacatttcgtctctcccgtcattaaaattgacagctttcagtgtggcctcatcttgttgggctacccattggtcgaaggcttgtcgtaagggtatgtctaagggttgttccaaggggacggagtgtactttgtcgaatagcgtgttgaaaaggctcataaactgatccacccgttccggggtcattccgggggtcgtacgcaagattgcgtcattttgtaatttcaatatttgtaagccatcaacacccacacctgccagagaaataacaaatgacacgtccggggagtcagctcccagcatgagtgccacttgtccgccttcgctatgtccgatgactccgatgtgcttggtgtcagtttccgggcgttgtttcaagtaattgattccggcttgggcatcccgtgcaaaatcgctcgtcgtggcctcctcgtatatcccgttggtttttccggttccccggtcatcggctcgtagtacgataaagccttgtcgggtgaggtagtccgctattttgaaaaagggcttgtgaccggaaaaggttccgtcccggtcttgtttcccggttccggatataataatggcagccggaaaagggcctttaccttgtgggatcgttagcgtgcctgcaacttgtatcgaatcacatgacacgtaggtgacttcttcggaacgataaggataaggtgggcgtgggttttgtgcaaaatagaccggttggaggctatcgactttaccgagagcgaattcccgagtcttcccgtaggtggttacttcggcttgaatggagtctttgccggaatggaaggaaccttcaaagcggatgttctcccggttgaagatggcaaggatactttcgtctgaaagtacgagcgtgtcggcttttgctttgtcaatccattgttcaggaagtgacaggaaggcttgagatgttccttctggtgtggtctctaactcgatgaaaactcgtttactaccggattgtccttgccaagcatgaggcgaagaggtgcatccgattagcgtgacggaagataacagtgcgattgttttaaggtgtaacatacagttttaattttagttttccctcaaaacatccaaccgcctgaaaagtgtcacttattttcgaatttcttactggatcttcattttcaatcctccattttcaattgtttcagcgtgatgaccgtgatctccggccatgcaccgaaacgcaggggcatcagtccgatatatcccaacccgacgttgacgtacaaaccttgtttgccttccatgtagagcccactccattccggatacatgaaccgggacggggaaagtcgtccgacggcaaattgcatggcgtgtgtgtggcctgccagcatgaggtcgatgtccgtgtcgagtacttcccggcgccagtgcgtgggattgtggcttaacaatagtttgaacgtgcattgttccgagcctttcatggcttttgggaggtcactgtattgagagaatggaggttccccgttattttccacgccgattaaggcgatgctgtccgcggcacgtttcaaaatcacgtgatcattgtttaataattgccaacccatggcagcctgcttgtcttgtatatcccggatattctgatcccgggtctcggtggtaggccagttgtggtaaggaccgtagtcgtgatttccgagaatggagaacacgccatccggggctttcagttgtgccagaatgttttcgaatggttccagttccgtggctttcgtgttgacgatgtcacccgtgaaaacaattaaatcggtttgctgggcgttgatccggtccacggctttttgcagggctgctcggtctccgttccaactacccgtgtgtatgtcggaaatctgggcgatacgatacccatcgaaagccgcagggaggttcggggaggtgaaagtgacctgtttcacgtcaaatcgtgttttaccccatatcgccccgtagagaaccatgatcatcatgcaagctcccagtacgactcccagccagctaaaaggctggatttgccatttgagtaagtattttaacggtaaatcaagcagcgagcaaaccatgaagatcgttttcggcaggactatggtcatgtaggcgattgtgaacgtaccgatgaggctttgtatggctagcgcatccctagaggatagtaaaatccagacgagcgtgaacactaggaacacggaagggagaaaccacagccaaccgaacgggctaccgcctgttgatctggtgatatacaatttgtagatatagatatccggaatgatgagtaacaaaaagagatagatggatagttttccaagcatattttctatttttatataagtgatgttgtcgtgtcgtttgtttctttatttaacaaagttatcatttcttttcacgtggttgtcgtgtacaagattttttatctttctttggggaatctttgagatattgtttgtgttcaaggaggagcttgtcaacttaatcttaattctttgttccgattggatgaaattaggatgaaaggataaaatatttttgatgatggggaattttgcgggagatgaaaagggaataaatgatgtatgtaaatataattactgcgttatgattaaaagtgttatgatataatttcaacgaaattcggttgaagaatttcgtaaagaggcggaggttggaatgttaaatgccgggggatgggataaataattttgttcttttgtggtttatattaaagaaatctctacctttgtcttgtcaattcgaaaaataataaagaaagtgtatagcacatgaaggaataagcctccggaagtgtgtatacacttttttttattaaattcgagttgacattccatttaatgatccggaggcttttttggaaaacgttttttgaaagatatagttacatgtaaatgtaatattttgaattctaatttgtcgacgagggtgaaagtaccgt

SEQ ID NO: 299 - DNA, 5725 bp, Butyricimonas faecihominis
tggcacgagtgagcgcgtgaatcataattatttatttaatacattataagtcatgaaacaaacattgacatttaacctttccacgatcgcttctacggaaagtaaaattaaggtcgattatttcgatacgagtgtagaggcgttcgataatggagaatatttgcagtcgttctatgctttattggactatgtgaacgacgaattccgtgagaaatacgggaacgcgaaaggaacggaatttaatattcctcatggttcgatcgtggtgaatataaagatcgaggatgatcggttgttgattcacgcaccgtttctctctttgccggagaagaatcgtattcccttgttacggcaggttgcaggcttgaattttaatgctatggacttggctcaagttgagttgaaaaaggatcgattggcattcgagtacacttgcccgctggcactggcaaatccttacaagatttattatattcttcaggagatttgtaacacgggagacaagtatgatgacgagttcgagaccaagttcggggctcaacggatatatgaaccgaaagtaactccttttgacgatgagacgctgaacacggtttacgaggtggtacaattgagttgtaaggagtgtatggatgccgtgaaggattttgaggtggaccggaaatacgggtttgcgtggaacgtgctggatacgacgatattgaagatattgtattacgctcacccgcagggacagttgttgaatgacttgaataaggccgtttccgagatggatcgggaagatattccgctgccggaagtggtgaattacgggaagtctgtcattgcccgcttgcagggaatgacgaaagagcaatgggctgaggatttgtattacgtggagacctttatttcggataaacgtcgttctaatttgaagaatattcaggagaatttcgagaattcatacaatcgtgcgacccaagcgtttgaaacaggtgattacatgacgtgttgcttgatgattgtttacaagttctacgagatgtactattataataacgtgcaggatgacgtgaatgcggttgtggttcgtgccttggaaaaagcttccgccaaaccttgggatgaggctgccccgatcttacatgctgccatggataatatcatggagggagagttggaaccggatgatgacgacgacgaggaaggtgaatttgatatgtcccagatgatgcagggtatgcagcaaatgatgcagcaaggaatgcaacaagcggcacaagccatgcaacagggcggtggaatgatggagtacgtgcagaaggtgcaggagttgcagcaacagctagctgccggacaggtgagtatggaagattatatgttgaaagtacaacagttagccgccacttatatggggaacggtcagcaacaataatgaaatttaatgattatggaacagaatatttttaacactgtatataaggtcaatcatgccggtgggtcaggcagttgtttttacttgaaaaattatgacctgttcgtgacgaattaccacgtggtggacggtttccgcgaggttgccctgcaagataacgacaaaaatcgtttttacgctagagtagtgttggtgaacccggcaaaggatatagcctttttaaaagccgagggggatttctccgccctaccggaaatcgctttgtccgcgttagatagcgtgtctatcggccagaagatcaacgtggcaggttacccgttcgggatgccgttcacggtaaccgagggaaccgtgtcgtccccaaggcagttgattaacgatagttattatatccagacggatgccgccgtgaatccgggaaacagcgggggaccgatgttcaatgaccgggatgaactggtcgcaatcacggcaagcaaaatcacggatgcggataacatgggattcggtattccggtgacggctttacgtgagttattggaacagatcggtgatctggatacaagcgtatataacgtgcaatgtaatagttgtgacgagtttatttccgatgaagaggaatattgcccgtcatgcggggataagttgccgtcgaatgttttccaggaacgttcattgaccgacttggcagttttctgcgaggaagctattcaggctatgggaattaatcccgtgttggcccgtgtcggttacgagagttgggtgttccacaagggaagttcagagatccgtatgttcgtgtaccagcgttcttacctgttctgtacttcaccgatcaacgtgttaccgaagaagaatctcgaacccgtgttgacgtacttgttgaatgcagaggtgaaaccttatcaattgggattggacggtaatcagatttatctgtcttaccggattcatatctccgacatcttctctgattttgcagacgaggtacagaaaaatatcacgaatatggcattcaaggcagatgagctggataattacctgatggatactttcgggtgtgaattgtccgagtatgccaagaatgacgcttgatagaggaaaatatattgagtcaaggaggctgttcaaaaagtcacttctcaaactccctccccccttcggggtactccctctataaacagagggagagctgaaatacttcctgtcttcgggaagagtcaccagctcctcctctgtttatagaggaggtggcacgaagtgacggaggagtttttggaaataaaatgactttccgaacggcctctctgtataaagtaaaaaaaatgatgaagacagagaaagagaagatgcttggcggggagctgtataacgccatggaccccgtactatacgcggagaggagtcgggccaaagagttgttgtacgattataatcatacccggccttccgagaaagagatcagggaacgtatcttgcgggaattattaggaagtacaggggatgattttctgattgaacagccgtttaattgtgattacgggtataatatccgcatcggggagaatttctatgcgaacgtggggtgtacgattctcgacgtggctcccgtgacgattggtgataacgtgatgcttgccccgaacgtgaacatatacacggcaggtcacccattggatgcggagattcgtaattcggggttggaatacgcttatccggtaaatatcgggaataatgtctggattgggggaaacgtgacgattgtaccgggagtaactattggtgctaatacggtgatcggcgcggggagtgttgtgacgaaggatattccggctaacgtggttgccgtgggaaatccttgtcgggttgtccggaaaattccaaaatagagatgattgtgtatataattgttgtatctttatctgcaaaatgagaatatggataaagtaattttaacccaagagaatatagaacaggaacatatttgttgtgccatgtctgacaagaaaagtgctgagggtgtggaggccaagaaagagtggttggcgtgtcgtatggaggagggattgaagtttgtcaaactgaatgtccggggaaaagttttcatcgagtatttaccggctgaatatgcttgggtgcctatcgaggcggacggctacaccttcatcaattgtctgtgggtggccggatcgtttaaaggacacggatacggtcgggagttgttgaaaacgtgtgaggaagatgttgcgggtacaaacggtgtggtcgtgatggtagggaagaagaagttaccgtatctttcggacaaggcttttttcatcaggcacgggtacgaggtgtgtgattcgtgtgttccgaacatcgaattattggtaaaacggttcagaccggatgcaccgtttcctcgttttaaatcgtgtgcctctgccggtttgggcgatgatgttaagggaatagatatattttacacggcacaatgtccttttacggtgccctatatcaaactactagatccggttattcaatcttcaagtgttcccgtgcgggtacacccgataatgactcatgaaatggcacgggatcatcgggcgccgctcaccacgtatagcgtgttcgtggatgggaaattttatacccgagaagttcttactccggtaaagttacagaaactactggcggaacagtaggtccggtttggaggctcggtaaattacaggtctgtttctaccgtgtcttttttgtcaatgtaattggagaaacggaattctggcataccgagggccatggcggcatgaatcgtgccgtttattcccagcatattagcgagagttcccttgttttcctgatggatggcagtgcagacgaatcccatgtagaattggtttaccccgagacattccgccatgagtgacccgttctgataagccagatttgcgtctgcgctcccgaaacgactggttttgggcgtgtggataaacagggcggctgtggctccccgcagaatcatgtcgtgtccgttggcatactcccggttcaggcggtcaaacacgggcaggtaacggtaggcgtccggcataattcgtttcaagatgggttttagtatcgggtttttcaatttcttggcggccgagttaaatacgtctagcgtgaaacggctgattgcgtccagttgtttgggatcggttaccagtgtgaagtgtacttgttgcatattacttgccgttggagcacgatgggcggcctcgatgatttgttccagcatctctctgggaatcggtctggttgaaaatgccctgttcgaacggcgggctttgcacacgagcatcatttgttcgggggtggggtagtcactgtatttgaacgcgtgtaccttttcaggcgggaattcggaatgaagtaccgagctggtaggacatactgccacgcaatgcccgcacacgatgcagttttctacgttttgtacttttaccgcggagccttttgtttcctgtgtgatgatctgtgaagggcatactcgtgcgcacttgccgcatttaatgcaggtacccgtgttgatacttaattttccgtccatgattctgtcattttgcctgtgttaataatacgttgtattgtttacaaaaataatgaatattctttaactttggaatcgtaaatttgaactaaccggggtattatatgaaacagatcgttttaacattgggggcaccgaatgatgaacagggaaatttaagcccgatggcggtggatcggctagagtgtacattagggctttatcttcataatgatggtgtgaagattctttgtaccgggggatttggtgaatccttcaacacgaccaatcatcctcatgcttattattcaaaacgttttttgatcgagcgaggggtaagggaaagtgatttcttggaatttgcgctgaccacgaatacggtggaggacttccggatgtcaaagccgataatcgagcgggaaaggccggatttgttgttcattgttacttctgattttcacatggagcgggtgaaattactacatggtcttattttgaactatcctcacgtggtttttatcccggcaaaatcaagtctgtcgggagaagagttagctcctttggttttacacgagaaacttgccgtcaagagtttacgggatcgggattttaaactgtattaattgggatggatatttttaagaaaaaacaaattctttcttttgtgaatttaaattttcctttatctttgcatccgcatttggagaggtggcagagtggtcgattgcggcggtcttgaaaaccgttgtactgcg

SEQ ID NO: 300 - DNA, 5696 bp, Butyricimonas faecihominis
tagtaatataagacagacgtttagagtggctaaaatagaactgagttctatgttctattctcctgtagcttggttggtgttgattatttttgccttgttgatagggtatgattatgcaaatgtttttgatagtcagttgagagctcaatctctgggtagcggattatggaatgtgtcgtctgcgatttataatagttggatgacgggtattttaaaaccgattttacgtaacctttatttatatatcccgttgatcacaatggggttgatgagccgtgagtaccaatcgggttcgatcaagttgttatattcctctccggtgaagaactcttcaattatatttggaaagtatttagccatgatgtgttatggtgcagctttgatgagtattatcgggttgaacgtgcttttctcttggttgacagttgaaaatttccagatttccatgcttttggtcggaatgttgggaatctatcttttgattttggcttattcagcgatcgggttgtttatgtcgacacttacggcctatcaagtggtagcggcagtgggtacgctggcggttttagctgtattgaattttatcggagatgttggtcaaggaattgatttcgtccgagatattactttttggttgtcaatttatggacgttcgatttcttttattgagggattactgcctagtgcggatgtgatgtattttttgattgtaatcggattgtttctttcgctctctgtactgaaattaaacacggagaagaagatcatgtctttgcgtacgaaaattctaaaatacagtacgattatcgtaacggcgttgttgttgggttatttgacttctttgccagaggcaaagttgtattatgacgggacttacacgaagagtaacacgttgtctccggagagccaagaggtgatggagaaattaactcaaccactcaccattacaacatatgtgaatattttagctccagattatttcgctggattaccttttaaccggaattgggattttgaacgttttgaacgttatgtgcgtttcaaaccggatatcaagatgaaatatgtatattattaccatcatgcaagtaatccagatcttgatgcacaatatccgaatatgactgatgaagagcgtgctaaggctctttgtaagattagtgatttgaattttaaaatgtttaaatctccggaggagattgataaggttgttgatttaagtggcgaaggctatcagtttgttcgtattgcagaacaaaaagatggtaaaaaagcgtttttgcggttgtttaatgataaccagcgtcatccgcgagagactgaaattacggctatgttgaaacgtttcgtggctaaagctccgatggtagccttttctacgggatacggttcacggagtattaataattatggaggacgtggtttctatttatttgcgaaagatttatggttccgttattcattgttaaatcaaggttttgacacgcgagagattgatttggatcacgagaaggtttcagatgatatttcagtgcttgttatttcagatttgcgagaacctttatcggaaaaagcactggctaacgtgaaggactttatggcaagaggaggggatatggtgattttaggggagtatggaagaagtgaaaacatgaatgaattgacggcttctttaggagttcgtttctcggatggagtattggcttgtccgaacgagttaggttctcctgttgttttgagaacgacttacacggaggaggctgttgagaaacattcaacatttgcccgtatgcgtgattttggatatggtgtatcggtgccttcatctttggcattggattattcggatgtgaaggattttgaggtttatcccgtgttggaaacgggtgataaggcttgggtcgaatatgaaacgaaagatcttgtagatggtgatttcatttgcaatgctgaagccggagagaaggaaggtgtttatgcaacattgatatatttgagacgtaaagttggtgataaggaacaacgtatcgtgatttctggtgatagtgattttatcacgaatgaagaatttggattgtcacgtccagggatggaggtgaataatattgagattatttctggttcattccgttggctttcagatgatgtattcccgatagatacggaacgcattgcggcaatagataatcatattgatctgtctcccggctggagattttggattaaattattttttatggtactcttccctctttctctcgctatttcgggtatttctattatatataggagacaacgtaagtagagctatagaaggtatgttttcacattaaaatttgaatgtatgttaaataaaatagtggaggttaaacatctatctcataaatatagtgtagattgggctattcgagatatcaattttgcgataaaggagaatggcgtgtttgggttattgggttctaatggagcgggtaaatccacaacaatgaatattatctgcaacgtgttaacacaaacggagggggatgtttttattaatggtataaatttaagggagcgtccgattgaggcgaagaagtttatcggttttttacctcaaaaggctcctcttcacacggagatgacggtagacgaatatttatatcattgtgcggatatccggttgatgcctaaaaaggagattcctgaggcgatggagagggctaaagcaaagtgtggaataacacattttagcaaacgacagattcgaaatctttccgggggataccaacaacgtgtagggattgcgcaggcgattattcataaccctttgtttgtgattcttgatgaaccgaccaatgggcttgatccgaatcaaattatggaggttagacgtttgatccaagaaatcgcaaaggatcgggctgttttgatttcaactcatatattacccgaggtgcaagccgtttgtgactatattatgatgattgaacatggacagaaagtgtttgaaggtacgattaatgctttcaacacgtatatgtctcctagcgctttacttacgattatgcacaacgctccctcttcggaagagttgatgaagatagagggagtcgagcgggtggagcggttgacgaatacccgtatccgtttacattttaagggggatgattcgattattagacgggtggtagaacaggcggtttcgaatcaatggcatttacgggagatttctttggagaaggagtccttggataaggtgtttgccaaattgtccggaaaggatgcgtgacgggtgttgatataataatacgttattttaaaagattataagaatgagaacgattatacggattacaaaatcagagcttcgagttctatttttctctcctattgcatggcttatcttgatagtttttagttttcaggtaggtatggcttacagtgatactctcgctttacaacttaaaaatcaagaattgggttatcggatgtttgcggtgacttcctctttgtttagtggatacacgggaattctttccaatttgttggagaatttatatctctatattccgttgttcacgatggggctgatgagtcgtgaattgagcagtggatctataaaattattgtattcgtcaccggtgtcgaatttgcagattattttgggtaaattcttagccgtcgtagtttatgctttgctgttgtgtgtgattttgatggggccggttatcagtacgtgtatttctgtgcaggctccggatgtcccgttgatgttaaccggagtgttgggtgttttcttgacggttttggcatatggagctatcgggttgtttatgtcgacaatcacgaaatatcaagttgttgctgtagtggggacacttgctattcttgccatattgaatttcattggtggtgtcggacaagaatatgattttgtacgggatatcacctactggttggctatatctggtcgctcgaaagtgtttattgacgggatgatcagttccaaggatacgttgtatttcgttttggtgattttcatgttcttaggactttctgtaattaagttacaaggagaaagattgcgattagccaagtggaaaacttcgttgaaatacagtttcgtgttgttgatagcgttggccttaggatacatctcgtctttaccgaagttcagtatttattatgattcaacggcaactaagatgaacacgttaaccgaggaaagccagcagattcttgaacaattgaaaggagacttgacgattaccacttacgtgaactatttggatgagacctatgatcgaggtgctccaagaaatagaattgatgatatagctcaatttgagcaatatttgcgattcaaaccagaaataaaacttgaatatgtttattattacgctaaagggtatatgccctatgcgaaggctgcttatgatacgatgaccttagaacagatcgtggaggataaatgtcggtattctggatacaatcctaaacgttttctacctttggatgaggtattaaagaaagatgatatttctggagaaaatggtcggtttgcccgggtgattactgctgcgaatgggaaaaaggcaattttgcgtatttatcaagataatagtgtttatccttatgaagcacagatctctacagcgttgaagactttacttcaggaagctcccgtggttggttttgttaccgggcataaagagagaagtggcatggatttgggcgaaaaagggtacggggcttttgcgtcgaataagacattccgttattcattaataaatagtggattcgggatacgtgaaatatcattagggcaaccagtgccagaagatattgatattgtggtactagcagatatgagaagtgatctaacggaggaggaatctcgtaattttgatacttatttggcacgaggaggaaatttatttatattaggagaacctaagcgtcagaaatttatgaatccagttgttgaaaaattaggattacgttttgcggatggtattatagtgtctccttcagagattcatttggatgatattgttgctgcggatataaaagaaggtgctgctacggtttcagaaaactatatcaagtattttcgtagaggctattctatcataactccttctgcctgtgcaatcgagattttggatacgacgaaaggatttaaaataacagaggtcttggctagtgcaagtaaaggttcttggatcgagaaggaaacgactgattttattaatgaaaagtctgtgttaaacccagatgctggagaggtggaacgttctaattcaatcatgttgtatctaactcgtttagtgaagaataaggagcagcgtatttttgtgattggagatgctgattgtattagtacgttggagctttcgcagaatagggccggttttagaagttcgaattttaccttgataacggaaacattccgtaatatgtcttacgaagaatttcctgttgatgctaatcgagtaaatccccctgatgatcaagttgtggtttctcaagatggagtctctaccataaaaatagttataatgtggattgttccactattacttgtggttggttgtgttatattattgtttagaagaaaaagaagatagagttttaatattatatcaacgttcggaagaataggatgttttaaggattcatttgttgatttgtaaaaatgaacaaatgaatcc

SEQ ID NO: 301 - DNA, 5689 bp, Butyricimonas faecihominis
cggctccaaagtcctgtattgaacttggagccgcatttttattagtatatacccgatactatcctacacccatttcaccaaagcaaaatcctgtctgtgaggaagtaatatgtttttcgggaaaattcgtaatcctagcatgaaaattccgggatcatcgggagtcacttcgatggaatacatcgccttcccgttctcgaaagagacgggtacaaattcctgagtgaaacaaacctcaatcttttcgtcctttttcatcatggcgaccaattctaccccgatgtcatcaatagacaactcacccaaatcaagtaccactttcccctggtaagatttacccaaagagataatctgtttcgatttatcgggaagaatcaatgcatccacctgcacggattcccattcccgactaaccttcctcttccactctgcaatctgcgtggctaaagcataattattatcactcaaacggtggaaacggcgagacatcggtatataaaacttatcctcgtaatccgtcaacatccgattacacgtaaagtttgaagccactttcgcgatcgtgtttttgatgtatccagaccacttgctggagataccgttctctccccgctcatagaacgccggagcgatttccgattcaatgatattataaatcaactcggcatccaactcgttttggaattcttgattctcgtacgttctttccatcggcaaagcccaaccggcatccttctgatagccttcaacccaccaaccgtccagcacgctgaagtgcatgactccattcatggcagccttctccccactcgtaccggaagcctcctgcggacgggtcggggtattcatccacacgtccactccttgcaccatgtgacgagccaagtccatgtcataattcggcaggaacaatatcttacccaagaactgcggatatttggagatctccacgatccgcttgatcaaatcctgaccggcctgatccgccgggtgagctttccccgcaaaaataaactgaaccggacggtccgggttattcacgatctcgttcaaacgatccagattactgaatagcaaatgagcccgcttgtaagtcgcaaaacgacgggcaaaaccgatggtcagaatatcatcccgcaaggtgtcttgaatttccacgatttgccgcggcgtgaaataagccgtactcttctcgtcagccaaacgatgctttatatgacggatcaaccgactgcgtaaaaccatacgtacctctttgatcacttgatccggtacttggtagataccttcaaaacaagttttatcgtaatgatgcgttttgaatttctctccaaacacgctcatctgtatttttttccattccggagccgtccaagtcgggtaatgcacgccattagttacataactgatgtgtaactcttccggcatatatcccggccataaatccttgaatatatcccgactgactttcccgtgtaaccagctaaccccgttcacctcttgtgataagttcgcggctaggaaactcatggagaacttctcattcgggtcatttgcatttacacgtcccaacccaagcaactgttcccacgtgattttcaagcgttcagccacaaaccagaagtaatttttcaacaggttttcggtaaatgaatcatgccctgccggaaccggcgtatgcgtggtgaaaagcgaagacgcccgaacgacttccatcgcctcggcaaatgagagttgaccttctgacacgtattcccgcaatctttccaacccagtaaacgcggcatgtccttcattacaatggtacacatccgcctgaatattcaatttccgcaaagcccggattcccccgatacccagcaaaatttcctgtttcaaacgattttcccaatccccaccatacaggtaatgcgtgatactccgatcgccttcctgattatcctcgaaatccgtatccaacaagtacaactcaacccgtccaacgttcaccttccagattcgggcatacacctctcgtccggggaatgcaagactaatcgtcaaccaatttccttctgcatcccgagccggagacaccggaattttcgtgaaatcctgcgcttcatattcagcctcttgatttccagcggcagagaatttctgcgtgaaataaccgtaacgatacaacagaccgatacccgtgatcttcgttttcttatcgctcgcctctttcaagtaatccccggccaaaactccaagaccgcccgaataaattttcagggaagcgtgtaacccatactccatactgaaataagcaatggaaggatcattcatttgttttttctcatccatgtactcggagaatttagcgtacacggctgccagacggaccacaaattcctcgtcattctccaactccttgtatcggtttaaagaaatcttatccaagagggctatcgggttatggcgcgtcaacatccattgtaaaggatcgatactcttgaacagatcaaccgcctcctcgttccaacaccaccataaattatttgccaattcttccaaggcacttaatttggcaggaatcgaccgatgaatgatcacgctgatccagttcggaacatttgttgccgctttcttctcgataaacgaccactgttcgtcttccaccaccgggatttcatcaatccgttcatttattttatctatcgcaatctgataagccttcttgtagtatgagatcaagttttcccaaagagcaatcttcgaaacgtccttggcattcttagctacagcttgatactctttttcgttcagcccggcaatcgcttttattttatcggtaatcttctcgaccacctcctcgttattccggtcattccgctctatcacttcaattcccggatgcgctttcttgtaataggattctacccataaaccgaatcccgctaaggaggtcgtgatcgtcggtactttaaacgccaaactttccaaaggcgtatatccccaaggttcgtagtaagaggggaaaacggttaaatccattcccacgagcaaatcataataaggcatattgaacacgccgtcattaccattcaaataactcggggagaaaaagaccttcacccgatcctccggcccgttcgataacctttgctcctcgatcttacgcaagaccggatcattttgcgggtccgacaattcatgcgtcacgtaaggatgtgtaatttctacggcctgatagggacgttccaaattattcagtaattcccgatttgcacccttgtgtcctgccggaaccagaataaacgccaaaatatcccgtttattatctgcatcccggttcaagcgtcccagtgcttcgataaacacgtccagccccttatttttaaactcgtaacgtccactgatacccacgattaaagcatcttcagcgaccgcccttcccaacaaagcctgcgccactttcaacaacttttcccgtccttgctgacgcttggcgggataatcctcctcgctgggggtgaaactattctcgaaaccattcggggtaacaagatccacttgcttacccaagaaatgctcacattctttcgcagtaatgtcactgaccgtcgtgaaacaatccgcccattctgccgccttactttccagggattgtttggaatccacgccgaaacgatgggccgtttccaccggattgtaatccttcatcggatcataaagaggcaagccgttcccggcaatactacgtcctaacacggtggcatgagtggtgaacacacatcccacttgtggaagggcatttttcaagtacaacataccgcttcccgtcatccactcgtggaactgggcaataatacgctgacgaggcgatatatggtaacggacaaaactttcgatcacttttcctgccgtgtaaccaaataacacgggttcaatgtaatcccattgtccggttaacgagtccacctgaaacttctcccaaaaagacgtcaaaatttgatccttctggggaataaaagaggtaaaatccaccagaatagccacggggttacccgccacgttccatcgtcccactttaatccgcaacccctcctgtgccgctttcacccgccacgatttaaacaaatgggcatcctctgtgaattccgggttcggttcattataccgccacacgtccgggccaatcaatatatggttgtttttgaattccccggccaaactcaacacctttgttgaaattaccgtgtgaattcccccaaccttattacatacttcccaacttacctcgaacaaataggcgggatctttcaattccaaattactcatatttaatttttaatgttttgacttcacttgtttctccttagtactcaccttcttcgtcgccttcgcagcactctccgcactttttacacgaggagtccgtttctttttttccggacttttctcttcttcggtgattttattgcccgcaatattacgcattttttccatatcttccacacgtgcgacaaaatcactcaacacattcatataatttatgaatgcttcatacggagtttcataaggtgaaacgtaacgatgataatcgttatcggagaacagtttcgtcctcatataatagaaatgatcactagcctgcaagcgagagtaatcctcgttcagctccggatcatttaatgcttccacttttggttgtattttaaacagctcttcaaaagcctcattttgtaattcatttcccaaccatccggtaatatccttttcttcatccgcccatgaaatcgggtaaggcacgtgcaaaggagccactggctgatgttttttcaccgcctcgctcggggtcaggaattcaaaatcagttgtcgagaatataaattcgggcaaagaacgcataaactcgaaaattccggtctcggccaattggttttcaccaaacgtctcgtagttcataaacaaattcacgatctcacgatcccgcgtactatcttttaaccaacgagcatatttatctgccgtgagaggccattcatgccagctatgatctgaaaaacgcagggtcaaatcgtcgcttaaccgggaatttttcaacaacagtttcaaccggggattcatcacgttcgtgtaaacaaaattcggactcttccaccccaacacatgctttgccccatcggttaacatggattcaaatcccatggcagccacccgttccccgatctgatcggaataaatcaacgaactattccgcaaggtcaccggcttctgcccgaataactcttccatcctagccacatgtcgtcgtacttgtctctcaaattcatccgtatcagacaaggatgccaacgagtgagcatacgtctcggctaaaaattccacacagcctgtcttggccaatttctggaaactttcaatcacttccggggcatgaagggcaaactgttccaatgccgagccggaaatggaaaaactcactttaaagttcgccccatagcgctgaatcatatccatgaccaactgattcatcggcaaatagcatttttccgccacacgccgtatcgtggaacgattcacatattcgtcaaaataatcatgacgcttgcctatatcaaaaaaacgataccttcttaatcttacgggttgatgtatctggaaataaaaacacaatgtctttttcataattttacattttaaattttaaactctaaac

SEQ ID NO: 302 - DNA, 5665 bp, Butyricimonas faecihominis
gagttaatctaatattgaatttatggaaaaaaattacgaacgacttaggacgagcgctcggaaaagagtggttgtttttctattaacatgttgtctggtatgtactcacacaatactttgtgcaagtatttatgggcaaaaaagattggatatcgtactgaatgatatattattggttgatgtattaaaatatattgacactcaaacggaatatgccgttttatatcgttctgatcaattaaacaagattaaattgaaatcggtaagttttaaggacgctactgtggacgaagtgctttccttttgtttaagaaatacgggtttttcttatcaaataaatgaaaacacgattgttatcagtaaacgagtcgggcaaaaagatgttttaccacagcaaaaagtgattcgtaacatacgaggaactgtgatggatcagaaacaagatcccttaccaggggcgacagtgatcattaaaggaactactatcggaaccgttacaaatacggatggtaaatttacgctaaaagttccggaagacatgaaaacattgcttgtttcctttgtagggtataaatcaaaggaagtgcaacttggggttgcagattcggttacggttgttcttgaggaggatgtggtggctatggaagatgtggtggttacgggtttcttcgaacggaaaaaagagggatatgcgggtactgtaacgacaataaaaaaagaagatttgcaaaaactttctacaggtaacatttttaccacaatcagcacgattgatgccgggtttaaaatcaatgaagacaatgtcaatggttcgaatccaaacaaattaccggatttcacgattcgaggaaagggaagctttcagaatggttcgacttctcccttgtttattctggatgggtttgaagtttctgccgagaaaatattcgatatggacgtgaaccggatcgagacgataaccttattgaaagatgcttccgccacaattttgtatggttcccgggctgctaacggggtagtggttatcgaaactgtagctcctaaagccggacagttacgggtgacttacgattttaaaccgacaattgcatttgctgacttaacgggatatgatttgatggatgcaaaagagaaattggagtatgagcgcttggctggtttatacgatcatactggagatttgaatgaaaattatgaaaaggatgtggattattacagtcgatataaaaatattcttgaaggtgtggatacttactggctttctcagcccgttgagaattctttctctcatgcacattcattgtatgtggaaggtggtgtagaaaatgtacgttatggtattgatgcttcatataatcaacaaaaaggtgttatgaaggaatctggacgagatcgaatgggcttaggtttttcgttgatataccggataaaagataaagtgacaataaaaaattatgtttcttacgcttacacgaaagcttataattctccttatggtgatttttctatttatggacgtttaaatccttacgagcgtgtgcgtgatgataaaggagaacttattcctcttttgttgaatggggactcaaatccattatatgatgcagaattgccgggtcgtgattttacgaaaactcaagagtttaatgaacaattaagtgtggattggatcatgggtgacggttttcgcttgcgaggacaattatctgtcagtaagtcaaatagtgaaacagagaaatatacttcaccttttgcatctcagtacgtattggagcaacgtaatccagaaacagggactcaggaatatgttccgatcgaaaaacggggagaattaagtttgtctaccgggaatgtcatttcagtcgcttctaacgtgacgcttaattacaataaactggttgcagaaaagcatcttttttatttaggcttgggaatggaagttaatacgtctaataatcgttctaatggttataggttgaccggatttcctgatgatcgttattcagatccctcatttgcgattcaatacaaagaagatacgagggcttcgagtagcgagagtgtgacgcgtgcgatcgggttcttcggaaatctgaactacatttatgacaatcgctttttcgttgatggttctttacggtatgatggttcttctcaatttggtgcggataataaatatgcctctttctggtctcttggagggggatggaatattcataacgagagcttttggtcgaaaacttctctgataaacatgttgaaagtaaggtattcttatggaatcacgggtaatcaggaattttcggcttatcaggcaaagacaatgtacaagtttcaagtagatcgtttgtatggtacgttgattcctgcgacattgatgggatatggtaatccggatttgaaatggcaaacacaacgtcagtccaatatcggtcttgatttcgggatgatgcaggatcggtttaggatgacgtttaactattatcggaaacgaacgaagggaatgttgacgtccattacggttgctccttccttgggattttcgtcagatagtttcacggctaatcttggtgaaattaagaatgttggttacgagttaaacttgaatatggtgtttatccgtgatcgttcgaaagatcttgaatgggcggtattttttcagggagcgaataacgagaatacattggtaaaaatatcaaatcaattgaaaggtattaatgaccaaaataatgcgaataaaacaacgccgggagccgtttacgaggaagggcaatccatgagtgcgatcaaggctgtgaaatcgttgggaattgacccggtaaccggtcaggagatttttgtaaagagagacgggactctttcttatacatgggatgcgaatgacaagattctgtgcggggattcggagccgaagtggtttggaaatattggtactaatttattctggaaaggctggaatctgaatatggtattcaagtatagttttggggcagattattataaccaaacccttgcctcgcgcgtggaaggagctaaccctgcggaaaacgctgaccgacgggtgttaaatgatcgatggacgaccccaggaagtcatgctctctataaaaatatcaaggagtacaccactacgtttatttccacacgttttgtacagaaagaaaatacggttcaattgagtagcctttccctttcctatgatttcccgagggaatggttgaaaaaatatcgcgtgaacacgctacgtttgagcttttttgctaatgatcttttccgcttatcgacaattaaagaggagagagggttgtcttacccgttccaacgtagtttcgtgttcggtttgaatgtcggattttaatattgataaatgattatattatgaagtcaaaaatatattatattattctgtccattttgctttcgctgacttcgtgtaacagttggcttgatgtgactccacaggggcaaatggaagcaactgacatgctttcgtctgaaaaaggatataactcggcactcgggggagtgtattatacattgtcaagttcatccatgtatggtaaagagttgtcttatgggatgatggatttactggcacaatattgggatatctctaataatacatcacactcttattacaaattatctcagtatgattataaggatgcgaatgcgatatcgaaattcaatgctatttggaaaggattttattctgctatatctcaatgtaatctgattatttcatctattgagaaaaaccgtagtagtattaaatactcggaattgatagagggtgaagcttatggacttcgggcatttgcacacatggaattattcaggatgttcggcccggtgataaaaagcgaggcagatcttgataaacctgcaatcgcttatcgtacagaattaaatacggaggcgcaaaaatttgaatcgggtagggagattttggcgaaagtaaataccgatttgacaaaagctttggagttgatgaaagatgatccgattaaaacgattggtagaaaaggggatttaaatacgtcccggttagattataatgaggtggttaatagacggggatctcggatgaattattatggtgttctcgggttattagctcgattggaacaattaagattaaatcaggatcaggcttatatctatgcaaaacgggtgatagatgaggttgaagagacaaaagcaattacccttattgacaaaacgaacatagaatcgaccgtagattcttggaaagatttgaattattcttgcgagatgttattctctctttacacgaacaatttatatgaaatgaccaatgctgtgttctatatggatggagagagtggagactcaagaacttcattcgggattaccacaaatttgtacaccacatttttgaatgagatatatggacgtacacccgatggggcaggtacggacaatcgcttgcgttattggtttaaacttcgagaaggtggggaatattacgagatattaaaattgaaaaaagctcctgaggcgcaaggattgtcggcagcctatgatccagaagtacctattatgcgtttgcctgaaatctattatattgcttgtgaggcacagatcgggaaggataatgatttagctctttcctatttgaatgcggtgcgtgaaacccgtaatctggtgaaactggaaggatcgttaagtgcagaagaattgcgtgaatatttaatgcgggacgagcgtaaagagtttatcggggaaggatgtatgtttttgttctataaacgattatttgcgtcgatttacgtgaaacaaggggttgttattgccccgctggatgcaaattttgtatttccgataccagatgccgagtacgagtactcgcctaacgagaagtaagcgaatgactaactatttaaaaatcagaatatgaataaaataatgaaactatgcacgagtattttcgtgatcgtaatgttttactcgtgtaatcaagatatcgatcgtttcgacaatgcggacaattatatttattttaatatgccgttcgtattaaatcaatacgggaaagagacatccgtgagacaggatagtttatcttactcttttgcgctggatgatatttctgttacctcgtacgtgtttaaaattccgatcaatactgtggggcttgctcattcgcaagaaaggacttaccgggtggaagtcgtagctgacagtagtaacgttacggatgcggattgggacaagagctgtattgagaatttgacggttaaacgtgatagtttacgtgacactttatatgtgaaagtgtttcgttccgagaagattcgttcacaatggtgtcatattgtcttccggcttctcccgaacgagaatttccaattgggagacgaaaagttattaacagccaagatatctttttccgatattttgactcccccggattggtggaataaatggcaaggagtttttggagatttctgtcgggagaaatttgtaaaatggcaggaaatctattatctgggagccgatccgaacgtggagacaataggcggcccgggtcttggtaagcctctgtactgggataatatgccttactatgccatgtcttcctggtatccgtcaacgtttatgtttgttcggattatgaaacaatattttattgataatgaag

SEQ ID NO: 303 - DNA, 5655 bp, Butyricimonas faecihominis
gccaatattaagaatatatgtaactcataatacgaaaagttatgattatcagaaatattactatcgaaaattttcaatcatactatgagagtcaaacaatagagttttctaaaggcttgaatctaatcataggtaatggaggaaaaggtaagtccaaactgttcaatgccttttactgggtattgttcggtaaaatatatatcactggtatcggttggtgtactacagataacttgcctcagtctgccaaatttgcaatgcaacgttatgagttcattaataaaagagctctattcaaggcacagattaacgataaaattagagcctctgtacaaattgaaattgaggacgataagggtaatgattatataatagagcgctctgtcaatgcattaagacttgaaggagaagaatgggactctaatgatgcttggcaagtaggaggtaatatgctgaaggtttcttttgattccaccacaggaacaaaagtgcttaatgatttattagctgaggataaaattaatgagttattcccagatggtattagaaactatatatggtttcaaggagagtcactcgaaagtcttataaacttcagaaataaagaaacattaaaagctgctgttaagcatatttcatatttcccttattacgaaaaactttctgaaataatcagcaagtctaaattgaagattacaggaattgaaagtcgtaaattaaaagaggttaataaacataattcaagcgttaaggggttattatcaaccattgacaacttaaactataagatttccagagaagaagagaacaaaaagcaacttgagactcacattgagactattaagatagctttagcagatggagaaacaaagatttctggattagcgagctattcaatgttagtaaagaaatacaaggattgtgaaaacgagataaataaattattgtcagaaacgactcgtatagatgagtttcaaagagagaaacttccttctttgtgggtccttcgtgggattgaaccaatgattcaacaatgtaaagaaattattgaaaagcacaaggaggaagagtatactgttccagaaaagaaatatctagataatcctagtcgctcaaagttagaagagatacttaaagataagaaatgctttatatgtggcactgaattctctgaagatgatgccccataccactacatcaccgaacgattaagattacaggaagagtacttaaaagaaatggaagagtataccagcaatatgcagctttctaaacagtttaacatgtttgttggtaagattcaagattatccagattcattactgatttctttgtcaaaaattgacaaacaatggaaagatagtgaagatgaattggaaagatatatggctcagcgaagaagaaagcaagatgaaaaacgtaaattggatgagcaaatagaagatataaagaaaaagcatggcgtagatcctgtaacccaagcagagacagccggtattatcaattcttcaattcgagcaagcagaagtaatttggaaactctacaacgaaagttggatgtttccaagcagacacttagtaattacaggagtgaattacgtattgctgaacgagaattggaaaaattaggagcaaaagatactactgttgcaaaagttccagagacagaatggaaacacatttcaacattcctagaagatatctgcaaaagagtccaggaaagtgcaagaaaagatttgcttcataaaattgaagaaagagcaaatctcttttatgcgaagtttacagagcatgataacggatacaaaggtaatgtaaaaataggtgaagactactctatagaatttgatgcgggtcttaatactagccatgaggatagaaagaagatgagtattataaatgctttactatcgttgaatcaagaggctatgggcatttattatccatttataagtgatgctccaacatctagtttcgatttggaaacgactcataaatatctgcttggtattaaagatatatttggtcaatccattgtgctaactaaagatgtggatttggaaagtgataaatatattgatttgcagaatcaaagtaatgtgtcgagaatttacaatttagagagcaagatatatagtggagattctaatcgtggacaacacgaagtttctacgcaaataacaatcttaaaataaggcaacatggaaaatatatttgaaattagattttcatttgaacaatatgttaaggataatgtaatccttaaattctcaaataagcaaggtggtgcctataatgtattttcttatcattggcaatgttttgtttgggctgcggttgttggttttatacacaatgaacgtagacctcttcagtctcctattgctgatcgcccttttagtttgaatacaatgtgtaatggtggtggtgaaaaagatgcggaggcattattgtgtatgtgtatagccaaagctggttcacttgacattatgaaagagccaacaaaagctattgatttaataaatgaatatgctaatggtgggttttattatataatgaaaatgatgcaagatcagccaattactaatgatttggaatgggttaagcaagaaatatttggaagatcattatgagcaagaagtataccatattagaggctgcaaaggaggtgttgttatcttttgacaaccaacctatgtctgtagcagaaatttatgcaaagattcttgaacgatctttatatacatttcgagcccaagcccctgtatctgtattaagaagtgaacttagaagtcattcattaggtatagattttccaactgcatcatcgaagaagtatttcatatatgatgaatctagcagaaaattccgtgtcaatgaggaaaataaagagcgagtaaagaatactgcaaaggagatggcttctctacggactgttcgagagttatatcatgagtatgtagaagcattccagcaaaagatccttcgtcaattgaagagtctcaatccatacgaatttgagaagttctgcatgaatcttttggacgtctatggtttctctgatttatcagttactcaaaagagtaaggatggaggtattgatggatttggcaaattaaaaatagggttggcgcatatgagtgtagcgttccaatgtaaaagatggaatgttggctctgttgggagaaaagaaatagatgcgtttagaggcgccattcaaggggagtatgaacaaggaatattcttcactacatcgtcgtttaccaaagatgctatgggctgctctattaaacatggggcagtacctataattctgattgatggcgaaatgattgtaaagtttatgattgagaaacaatttggaatcgaacatgaaaatatgcctatctacataaatgcactagatcaagtattatcataaaaaataataatattatgaataccaatgtaatagaaggaaatccaacgaaaaaattctttattgagatgataactcgggatatatccatcgaagatgccattgttgatttattggataattcgattgatggtgcaaatcggattaattccgcgatatacgatggattgtggattaagttaacaataaatgataaggagttttccatagaggataactgtggaggtttttctctggagacagctaaaaagtatgcttttagatttggtcggccagaggatgcccccaaaatgcgaaataatacagtaggccgatttggaatcggcatgaaacgttctctatttaaaataggtaagcacttctctgttgagtcgttatgtggttctgatcattttttagtagatataaatgttgaagaatgggaaaagaaaacaaagactgtgacattgccaggtgaagatactccaaccatgatcgatgattggagtttcaattatcacgagcttgataggggcggcgctttacagaacgatggaaccttgatcaaggtgacaagcctgaaccccgaagttcaagaccttttctctgacactcgctttattagtgagttagcggaggatattcagcgtttattaaatttcagccttttgcgtggactccaaatatatttaaatggcacagctttagaaggtaaaaaggttgagttattaatatctgatgaatgtatgccttattacgatgaaggcgaagtaagagatgttaaatataaaatcgttgcaggtttgggagaaataggcgagcctaaaaaatctggatggtatatatactgcaatgatcggcttgttgtagaggcagatgaaacaacaatgacgggctggggactttcttcgattcctaaatggcacgtaaatcatgtgatgtttagaggtatcctatatttggattcccaagagaccatgaatctcccattgacaacaacaaaaaaaggcattgatacaacttcagagatatataaggccatattgccgaggatgaaagatgccatgattaatatattggattatctgaaaaagatatcattaatgggagatcaagctaacagctatcgtcgtatgttatgcgatacgacggagagagcctcagccgttgagttgaagtctctatctttcgctgttaatggagagcctttagtgcataaaaacttcatatctcctccgcttgatgaagatgttattgcacaaaaaaagaatacagtaagaatagcatatgatgttaataagtctaaggcaaatgacgcaaaacatcatgctgaagcaagtagttataaagagcttgggagtataacatttgattattatttacgaatggaggacatctagtatgaaaagtccaacagttttaaattatgaagtaagaccctgcaaatttgtcgagagacggatgttactatctgtgctctctcgcattataccattatttcaacaggagtatcaatatattggttttggaggattgtcttttacagattttaagatgtttcatcgagaactccatatcaaccaaatgttcagtatagaatacggatatcccaaggaaaaattagaattcaataaaccgtattcttgtatacagatccaccctggtagaagtattgatgaattgagtaaaatagatctaacgaagccaagtattatatggcttgattatgatggatgcttaaatagcgacatatttgaagatttggaaattattttcaatcgaattccacatggcagcatatatttaatgtcttgcaatcgtcaaatgaggaatggagacaatcaagaatataccaaaagcgaacttaaagaggtatttgggccgcttgttccatgggatatagaagataaatgctgcgtagattctaaagctccgtatacaattcgaagaatgctagaactcgattgcataaatactattaaggataggaataggatgttggaacataggttgaaatttgagcctatctttaatattacatatgaggaatatagaggagccagaatgtttacatacggaggtgttgttttgaatgaaagtttcaatgaaaagttattgcatttcgaagagtttgattttgtagggacaccagatccttataaaatagagattcctaatctcacttacagagaagcaatggctttaaatcaagcattaaatattgaagatgaagaaacacttttaatctcaaagaagat

SEQ ID NO: 304 - DNA, 5616 bp, Butyricimonas faecihominis
ggtactccctctataaacagagggagagctggaatactccctgtcttcgggaagaatcaccagctcctcctctgtttatgaggccactgaaaaagtctttcttttttttgaaagacttttttcttttaaaatatcctcgcactaaaaagatgatgggattctccatcactctaggattttttttaaatttaaacctgttgattcgattttttagctgccaaacacgatttagagggataatttgccggttttacagtacttttttgcttaacgttaatattttcagcgtgttggcggcgaatatagttatcgctccttgcatggacatgcaatcaaggccacatgacacggccctgtcatacccgaacacgttcttgagctgtgcgaatttagcctccacgcggggacgtaacctggcattcgctcgaaaaacacccgtttcttgaaatttcctttgctcgacatactcgtcagattttatcatcaccgagaacgtcttcttccttgctccttccttgtagcatccctcgcgaagggggtactccttgcatcgtttcacgtcaaaaaagtacacccggcggacgttcttgttaccttccggtttctggtagcattccttgcatgccaggtgccccgcgggacaaaccatcatcaccgcatccttgttacaaacgaatcccgtttccccgcgtaccccgcccagcagggggttcaatctcgataccagttgaacgtcatgcccggtagcgtaaatgatattatcccgacccgagtaagccatgtcaccgattaccgtgtccacctccatcccgttctccacgcttcgctctacgagcggttcaaggtattacccgtccgctttctcccccgtggttacaagggccgccgtgatgatcccgttactaatcatggcaacgtgtgtcttgtaaccgaaaaaagacttgttcaccgtcttgtgcccgacccgggcctccttgtcaacggaaaacgagacggaatccttgacgtcttcaagggtttcctccagaaggttgactcgctcgttcaccagcggaagggaagacagtcccccgtgggaacgaacccgttgtaccagactcgtgcaagccgcccgggtttgtccagcgtttccccgggggaaaccgtcgagaggatatcgttgatctccccggcagggagagggtcctgccggatcgaggattgaaggtgacggagacgaccttgcaaagcgaccctgatcgagtacaagctataacgggaaagcgtgtgggtggcatcgaggattatcgccttcccttctagaacaccacggacacgggcaagactaacattttactcacgaggagatccagcaagttcatgtcttttagacgctgacgacggaagcgggtcagagggctggcatcgagaacgtcatcctcggggactaaacccagaaaatacttgaaagaaagatcgtaacgcaaacgatctacaacgtcagagagatcaaagatcactttcaaaagaaggtacttgaagacccggaccgggtctatatgtagctaatacttgaaaagggacccggaacaacatttgaaaagggacccacccatgggtatgtttaaccgaacaaaattggtatattcataaaaaccaatggcgttcataatatgtaccacatggaagaaagagattccataattctcgcctataggcgtgaaggattgagcatccgtgagattgcccgtcgtaacggcatgagccgcaagactgtgcgcaagtatctccgggctttcgaacaagcggtcggtgacaaccccgatgcggaagcaatggacacgtacctgcagcagccggtgcgctatgacagcagcaaacgtgtccgcagagtgatgaaccagcaggtgatggaggcgatagacggcttcatggcccgcaaccggtccaatgccgcggtcggattgcgcaagcagcagatgcgcaagattgacatgtggcgccggttgcgcgatcaaggtatagagattgcctattcgacggtatgccagtatgtccgtgcattggaagttgcggtgtccgctcctgccaagtccccggcggcgttcatccgccaggagtatgaaccggggtttcggtgcgagtttgactggggcgtgctgacactttggattgacggtgtcaagacgaagctgcacatggcggtgttcacgatgaaccatagcaacctgcggcgggcatacctgttctcccgcgaggacacgttggccctgatggaagcacaccgcaactgcttccgtgctttgggaggcacgccgcaagtaatggcctacgataacatgcgggtggccgtcaagaagttcctgggacaggagcgcgaacataccgatgccctgcgccgcatggaactccactattgtttcacccctcatttctgtaatctgcgttcgggatgggagaaaggcaaggtggagcgttcggtggaacatatccgccggcgggctttcgcctatgatgtccgtttcggttcgctggagcaggcgcagtgtcatcttgacaaggtctgtgacaggctcaacggggaggcttccaacatgtctgcgcaggagaagaaggagcgcgtacaggccgatattgcggctttgcgaccgcttgaccacggtgacatgggctgctttaagcagcgccatgcccgtgtcgggaagtattccaccattaccgtcgatggtgtgcattattctgtgcctgaccggcttgtcggtcgggaggtgcccataaagatgtattccgagcgtattgtcgtgcttgacggtcgcgacaaggttgccacgcatgtacgctcccggcgtctcggtgactggcgtatcgacctgatgcactatctgggcacgttcctgcgcaagcctgcggcgttgggacgatccacggccatgcaacaggtacacccggacgtggcggcactgttccgcaaacattttgcggattctcccagatcgtttgtcgaactgctcgtgtttacccgtgacaaccggcgcacttatgccgacatactggctgcggaagaccgtctgtcctcccggggactcaaacgcctgtcttccgaacaattgagcgccgagatgctggcctgtgacggcaatgaagccgcaaacgtccatcaagacgcggccaccctgtccccgtccgatccacaacagaccgccattgaagaatcggcctcacagacattggacacactttcggcgatgatcggatgtggcgcacacaacaatccgtaaacaaaattaacgtctaacaacataaaaattgcatagcaatggaacaaaacgaaaatcaagactctatacgcgaacggatacgaacgtatgcattcgacctcaaactcccgctggtacgacgcgacattgacctgcttatacagcaaggacttgatgaacaatggaacctgtggatgttcacggccgaactcctgcgtcgggaaaaagaaaaccgctcggagaaccagcgccggcaccgcatcaaaaatgccgcgttcccacagttgcggtacctcaacgaaatagacacggacgcgcttccgactgaagcacggaaggccttgccaaaccttgagacacttgatttcatcaaggaagggcgcaaccttatactatacgggaatcccggtaccggaaagacccatctggctacagccttggggattgcggcctgcaacgcgggatactccgtactgttcacttccgtgcccagactgcttacgcagataagggagtgccggaacgcaatgacgctaagggcactcgagaacaagttcgaacgatacgacatggtcatctgcgacgagttcggatacgtctcttgtgacaaggcgggagcggagatgttgttcaaccatctgtcactccgaactgacaagaaaacaaccgtcattacaacaaatctcgcattcaacagatgggacgagattattgcagacaaagtactcgttaccgcaatggtagacaggctaacgcacaaggcgattctactgaacatgacgggaaaatcgtacagaatgaaagaaatacaagagatgataaataaacaaatttaattaggtttgcaaaacctatcgggtggtacatttttcaaatgctacccgggtcccttttcaagtgttagctacagttcaaggacaggcatggcaacgtgtattcacacaggacaaaccttgccggaagcatctattccgtaagtctgcatctggaatcgaagagcggcattccccacctgcacgctgcggtctgccgcaaggacaaggacggcagaaccaacaacgaccacaacatacatctccgcgcacagtatgccgcagagcgtatagcccggaaacggggctggacgacagcagcggaaatccgcaggacaaacgccgacgaggttgcccgggaacttacgggtatcctgcgttccatgccgtcatggtcatggaacgattatgttgcgagggtgcggcaaaagggttatacgctcgaagaacggcgtgacaagaaagatgtgttgcggggttatacggtcggtatcggagatgtcatctacaaggcttcggaacttggcaaaggccgtaccctgatggcatcaaagattgaaacgacgtgggacagacttcacaaccggtccgtgacagagcttaagcaggaagaaaacaaggtcccggcacagactgcaacgcgttccgatgcaggcttgaaaacaaccggaaacaaacctgttgcagattattcttcatggcacgacggaacatcaaggtatgaacttacatatgatggcagggattacaggttctatatccccgacaatgtcatgcaactgtttgatgacgagttcgactaccgggaaacagacaaccacaaggagcttacggactatgcagtggctctgtttgtcggcatgatgaatgtcccggctgtcccgtcaggtggcggaggcggcacttccagcgacctgccttggggacggaaagaggacgaggacgaaatggaacgtgcccgacgttgtgcccgtgcagccatcgccaaacatggcagacaacctaaatcatcacgcaaacgatagaaaggaactttatgataggcagaaaatacgattacagcaatgagctggcgcaggatgtaccacagagtgagaacgaagaacgcaaggcagaagcacgaatccgacggcttgaagaacgcagtactgcattggctgacgagttccgtgacctgaaaccggaaatcggcagggtttacaaccttctgcaaaaacttgtcagtcagacaggcgcattcgccaccaccatgctcaacctgcatgacctgctcaaaaccgatttaccgatccgtttttcggaagaggacaagaaaatgttgcaggatgagttgaacagtatcgccagaaaagcctccgaagagatccgcaagaacgagaaacggatctcagtaccgcaggcggttttctcgtgcatggttatattactgatactcctttccgtattctttgctttggtcatttttgccaacctgaaactgctccgttccgacatgctgacagaactggtgatcttgtattccatactcattgtcctgactcttgctgtcgcctatatattttatagct

SEQ ID NO: 305 - DNA, 5596 bp, Butyricimonas faecihominis
aatataaactacaataatatgaaaaaaaatcgattaattaggtttcctggcctattaaaaaggtacaagaaaaatttaatgattatgaaatggtgtattgcttttatctgcttgttcactttgaacttgtctgcgaatgtgtattctcaaaagaatattgtgtcgctggatttatctgatgtatccattgaacagtttgtgaaagtggttaaacagcagacgtcacttaaattcatgtataattcatctcttatccgtcaggcggggaagatttcagtgaaagttgaaaacaaggagttgaaggacgtgctgagtatggtgttgggtaaagtcaacttggaatacgaattttttaataacgtgatcttgattcgccaaaaaggagagggaaagagtgagcagcaaaagaaaaaggtggtgaacgggacggtgaaagatgagcatggggtgaccttaccgggtgtttccgtcttgattaaaggcgagagcgtgggtgttgccacggatataaacgggaaatattccatcacgattcctgagaataagaaggaggttgtttttgctttctcgtttgtcgggatggttccggtagaggttcgatataccggtcaggattcgattaatgtcgtgttgaaagaggatgtcgaaaaaatagatgaggtggtggtaaatggttattttaccagaaaaaaagagagttacacgggtgtttctacgaccttctccgggaatgatttgagaaaagtatccacggggaacattctgaacacgttgtccatgcttgacccttcttttacgaaagttgtgaataacgagatggggagtgacccgaacacgattcctaatttcgagattcgcggttccagtagtttgaaagctgattttgacgggaatccgaatatgccgacatttatcatggatggttttgaggtgtcggcggaaaaagtgtttgaccttgatccgactcgggtacgttttatcacgatattgaaagatgcggcagcaacggctatttatggttctcgtgcggcgaatggggttgtcgttattgagacagaggcgccgaaaccgggaaaattgcaattatcttataacgggagcatgaattttgaggtggctgatctttccgattataatttgatgaatgcggaggaaaaattggaatatgaagttcgtgcgggactgtatgataaagaagacaggcctgattggacggatgacacgtttgacgcgtataatcaaaaattgaaacttgttaagcaaggaaatgatgtggattggttggccattcccgtgagggagttaggagttggtcacaaacattctattattgcggaaggtggtaacgaatcgtttcgttatgctttagacctttcttattctaataaaataggtgtgatgaaaggttccaaacgtgaaacatacggaggaggaatacggcttcaatataatttgaaaaagttgaagtttacggattatgcttcatttgatcacgtgaaatccgtgaattctccttatggtaatttcagtgcttatcaatattacaatccttattataatccttatgatgagaacgggaatgtgaaaaagatgctctacgagtactcgtattatgaccgggggtttcagacaaaaaagatgtacaatgagttgtataatgctgttttaccttctaaagatcaatcgacctcaaatcgtttcttgaataattttgctatcgagtatgatattattcaagggttgaagttaaaggcgaatttatcgttaagtgttgacaatggaaggacagatgtttataagccatatgaaaacacggaatttattgataaagagaagaagggaagttactcgcagggacaatacgaggatttcagttatgatgtaaatattatattgacgtatttcaaaacgtttaaaaagcatgtcttgaatgccggttttatttataacctgcgtgaaacgaatcatgatcagacggatgtgtatgcgcttggtttcccgaatgccaacatggaccatatttcgatgggtgccgggtttaaagagggtgataaacccggtggagcttacgatgtgacccgtttggtgggttttgtgggtaacttgggttacacgtatgacgagcgatttctgcttgatttttccgttcgtagtgatggttcttctttgtatggatcgaataatcgttggggtacgttctggtcgttaggattgggatataatttacatcacgagaaatttatggaacgtttgacatttatcaacttgctcaaaattcggggatctatcggaacgaccgggggacagaattttaacccctatcaatccatggcaatgtattcttataacgatgaccgaattagttcgatttcatatagtggttatatcggagctatattgaaggctttcggtaataaaaatttgaggtggcagaaggttgaaaaacaaaatgtgggtttggatttcgagttgtttgacagacgcttgacggggtctttcaacgtttataatgatatttccaaggatgtacttattgacgtgactcttgctccctcgctgggattttcttcttacaaggagaatctgggagaggtgaaaaacagtggtgtcgagttaacattgaaaggtacggtaattcgggatagagaacgtgaaatttattgggacatcatgtataatctggctcataataaaaacaaggtgacgaagatcaatcaggcattgactgcttttaatgacaagcaagatgcagaagtgaagaataaaccggtgatacggtataaagaaggcttgtcacagaacacgatatgggccaacgagtcgctaggtatcgatccggcaaccggggaggaaatttttttggatatgaacgggaataaagtgaacgagtgggatgcagcgaattacaaaccattcggatcgacggatcccaagatttacggtacgataggaaccatgttcacgtataaaaagtgggaattgaatgcacacctgtattataaatatggcggttatatctacaattcaactctcgtggataaggtggagaacgtgaacccgaacgagaatggtgataaacggattttgtatgaccgatggaacaaagagggggatgtggctaaatttaaaaaagtgagtgacgtgtccgtgactaacccgacatcacgttttatagagaaagaaaactacattcaattacaatctttgtcaattggttatgatttcagttgtgataaattgagagaaatagggattcagcgtctgaaactttctgcgatcggtaatgatatttttacctcgtcaacggtgaaaatggaaagaggtacttcgtatccttttgcacgtactttctctctctcggcccaattaactttttaatcaggtaacattatgaaaaaacgaatgaataaagcaataattctttcactggttctcatgcttacggcatgtaacaattggttggatgtttcgccgaaatcagatatgaaagcggacgatctgtttttgaccgaggctggtttccgggatgggttgatcggtgtttatgcgttaatgtgcagggaggacagttatgcaagggatttgacgtatggttatctcgacgtgctagctcaatattacaagagtccccatcagttgacctcttcgggatatgagcataatttcaagaaagcggctgagtataattacaaggaaacggcggaagaagcacggattctggctatttggcaaaaccattttacggcgatagccaatattaacctggctcttgaatatattgataagaagaaggacgtgttttcttcggaagatatttataagatatataaaggggagtttttggccttacgagcgtttttacattttgacatgttgcgtctttttgcgtcatcggcgagcatggataacggtaatggtttgaattcgatggcaattccttacgttgatgtttatacgaatgttgcccggcctcaattgacggtgaaagaggtgttggagaaggtaaaaaccgatcttttggcagctaaaggcctgatgaaaggtctggaagtgttcaagggattgatggagtcttctgatccccaatataaccggggacaacggatgaattattatgcggtaacggctcttcttgcccgcgtgtatctttatggtaacgagagagagttggcacttgcacaggcgaaggagattattggggaagtgaatggtgagaaccctacttcttacgagttggccaatagttctgctacttcgggaaatccaatgtttagttcggagctgatattcaccttggatgtgcagaaattgaaagatttgagtgaggtttattttactgaaaactccaattctgtttccagcatactttccatgtcatcgtccggtaaggcaaatatatttaattccgggggattggagagtgattttagaagttcgtggatgacattgggaaccgatggagattcttatgtcctgggaaaatataaagacatgaaatatattccgatgtttaaactttccgagctttatctgattgcggcagaaacggcaactggaagtgaggcctatggttatttgaataaattgaggaatcataggggattggcaaatgtagcaccgacggcagatcttgaagataatatctttcaggagtaccgacgggaatttataggagaaggacaaatgttcttttactataaacgtaaggtgatgcaagtgatcggggcggataataacattgcaataaagaatcctaatgcgatttataatttaccgatccccacgaatgaagttgattttggaaacataaaaaaatagaagctatgagaaaattatttattcttcttttaggaatcgtattttattcttgcagcgagaatgatcgtttgatatatagtgagggaatgcatgatatatattattctgacgtgacaaaggacaaagacagtatattcgtgtctttactgacggcagaacgggaattgacgacaacaattaatgtcaaacttttaggtgatacgttgcgtgtctcggaaaaattcaagttggaggtgattccgggaaaaacgacagcgaaagagggtgttcattaccagaaacttcctgaaacatacgagttccctaccggggtgtttgagtacaaaatgccggtgacattgattaaaggagatgaggggatcacgaaagctccggttatcttggcgttgcgtcttgttccggttgccggtttgggtattgcttacgagaatcgttccgttgtgcggttgattatttcggatatgctccggaagccggaaggagatgcgtattatgaagatatgggggccttcgtgggattattcggtgagtattcaaggaaaaaacatacgatgattatcgagttgaccgggcatgatttttgggatctcggttacggggataggcctgattataacgatgattataaaatttattacgagtccggttattataccccgtatgccagaaaattatacaagatcatcacggagaataggatagaggatgaaaatggaaaggtcatgcaggggtggatggttccttaaatagtaagaaattatgatggattaataatgag

SEQ ID NO: 306 - DNA, 5582 bp, Butyricimonas faecihominis
atctatgcgtgataaattactgtttttgctgaaatactatctcttttggattgtattttcatgggtggccaaggtggtgttcttgatatatcaatacaaggagacggtcactcttaccggacatgattacatgatgatctttgccaaagggttccgcatggatctttcgtttggcggatacgtgattttgttgtcctgtgttctgatggcaataggtgtctttttatccgcaaaaatattgaaacgtattttctcctgcctgacgcttttgcttttagtggtatcgagtctgattatcgtgggagatctggaattattcaaaaattgggggtatcacatggatgcaactcccttgttttacttgaagacacccggagaggcgatggcctcaactccgacggggttgattctgttgctcttgttactctatgcagtcatggtggctgttttttacgcgatttaccgccgttgggtggccaagactcttcgtacggacagacgagaggcattatggcatggtgtcgtatatcttattttaggtggtgttgcgtttattcccgtgagaggcggtttcaacgtggccccaatgaacgtgagtttcgtgtttttcaataacaaaaatatgtatgcgaatcaggctgcggtcaatccggtatggaacttcctgtacgaggtaatgcatattgacaaggtaaagggaaattatgcttttatgccagaagaaaaggctcaacagttggtggatagcgtgtatgtggaaacgggagattatcctagggtattgaaaaccgataaacctaacgtggtggtactcttgttggaaacattcacgttaaacgcttgggacgccatgccgaatttacaagcaatagccaaggaagggatatttttctctaatatatacgcaaccggaaatcgttcagaccggggtatattgggggtgatcagtggtttccccgcttatccgaatgcatccatgttgaaatacccgaacaagacttatgaacaaccccgtttccctctgaattttgaggcagaaggatactctactcgtttttattatgcgggggatctcaattttggcggattccgttcttacgtgaccatgagttttcagggtacagttaccgaggatgatttttcgggagaggctatcgagaaccgtttcaaatggggggtacatgacgggtatatgcttgatcgtctttacgaagatttgcgaattgcccaagtaccgttcatgtatatggcgtttactatgagtagtcacgaaccctttatcgttcctatggagacaaagattccgggagacgatagcggttccaagttgaagaatgcgattgcgtacacggatcaatgtctgggagaattctttgaaaagtgtaagaaatcggggctttgggataataccttattcgtgctggtagccgatcatggaacccgtcacgtggggaatttacaacctcatttgccggaggcttatcgaattccgatgatcttcacgggaggagcgatgaacgtgcaggattccgtggtcaatacattgggatctcagaccgatatggtggcaacattgtttgcccagttgggaatggatgcctcggcattccattatagcaagaatttgcttgatcctacggcggtgccttttgctttttatgcttattccaatgctgcagcagtggtgacgaataacggggcatacatctatgatctgaaaacaaaaaagccgataggacctaacacgaatccccaagatggagagttattgaaagcttatttacaggtagtcgatcgggatttcaagaaatgaatcaagggggagagggggcaaaagtcatcccagtatattctttcagatcatctagaacgatgtggaccagttgttgcgaggtgtcgcaagggttggatttgataatctttgccgagaaaatttcattatttacaattgttggttagcttgattaaggtgatttccggtctttggccgatacgtccagcgaatcccagataaccaactccccgggaaacgtacaattgttggccgtttgctgtatacagtccgttatactccgggtagacgtacactgccgggctccaccggaaactgccgatggtgattcccagttgcatggcgtgcgtgtgacctgccagcatgaggtccacgggataatttagtacctcgtgtcgccagtgagacgggtcgtgagaaaggagaatgacgggataaccgtctgtcccttccaaggcttgagctaatttgccaaaacaagggaaggggggaagtccccagttttcaaccccggccaaataaagcgtatcctttgcgatgacgagcgggacattcgtgttattcagcatcgtgaaatcagcccgtttcatatttttgaaaaactgtttcaggttattctcttggtctgttttcgagggccacttcacgtaagtaccgtaatcatggttcccggtcgtggcatatttgccgtatttggcttttaatttttttaaggtttcgatccaaggggtcatttccgaggcaaaactatttaccatgtctccggtaaacacgatcaagtcgggatttaaccggtttacttcatccacgagtttcgtgattccgggatagtgttccccgtaacttcccaagtgtaaatcggttagttgtacgatgcgaaaatcattgaaggcgtcgggtagagttttgatacacacggtctcccgctcaattttgtagttgtacctgtaccacgtgatcccgttcaatataacaataaaagaggctagagctatacctagagccagtctgttcacgattctggcagccggaatgcatttagccttcctcaataagatagagaaagcatttacaatgatatacaaagtcttgggagtatagaacagcaagatgatagagatgcatttttctacccagaaataggcttccggaccttttagagttgggataaacaagtgataccacacgatacaagccacgaaaaacaaggagtgcagccagaataaatacgagcatattttccgcttgaaataacgtctgatctgtaaaaataggagcgagtcattcagcaacacgcagaaaattccagctatcagtatgaataatcctgttttcatggttagttatttaaaaataagtgttccgaaaaattccggtcgatggaaatccggtttttccgttggaatcgggttccacgtgacaaagtgagggtggggaagtttgttcccgcatttatgaatatttcccctgatcgtggctccggaagtgggaataaaagtgtgtttgaaaaaagccgtgtgagggaatctgataatcagtgaccattgataaaaagcttcatcctgattctcattgttaaattttatggtagaatccctgagaatggtggtacttatttgcattggcattaggctgcgattctctctacccgtaccgtaagcgcataagattgtaccgatcgcattgatttcaatattgtagtatccgtccccatcttccaattggatgaaaagttccacgcaggaatcttcccacacgtgtccgcaatccgtgatttccgtggctcggaattcattttcatgcacgtcaaatttcaagaaaatgtgctgttcgttataagcaatccggaaatggatgtccgggcgataagggtaagtatccggccagtttacttccttcaaggtgatacgattacactcccggtctagatggtagcttaacacttgtagcgtttcgttacttgcatacggggggaacttgacaatatcaatggtatccatggcttagaacgaaaatgagacgtgtcaggaggaaccttcctgacacgtcagttttaaaatttatttagaacaatccggtgatcttaccgttgttatctatgtcaattttttcggcagcgggaatatccggtaaaccgggcattctcatgatgctacccgtgatcgggatgatgaatccggctccggatgcaatctcgatctggcgtaccgttaccacgaaatctttcggacggccgagtaatttcgggttgtccgacaatgatttctgtgttttggcgatacaaaccgggagtttatccaagcccaagtccatcactttcttcaagtcggatttagcctctgctgtgtagtcaatagcggctgcaccgtacaattctttggcaatggtttcaatcttcttttcaacactccattcccaatcgtacaatggtttcatgctacaagtacattgttctgccaccttggcaaccagacgtgccagattttccgcaccttcaccgccttttgcccatacctcggcaacttccatgggaacgtcaagctctttacatttctcggcaaggaatgtaatttcctcgtctgtatctgtaacgaatttattgatggcaacaacagggcagatattgaatttcttcatattctcgacctgtttttccaagttggccactcctttcttcaaggcttctaagttcggttctttcaattggtccagtttggctcccccgtgatatttcaatgcccgaacggtggccaccatgacaacagcactgggttttaaaccggctttcacacacttgatgtcgaagaatttctccgcaccgaggtcaaaaccgaatccggcctcagtcaccacgtagtcggagagagttagtcccatgcgggtagcgatgatcgagttggttccttgggcgatattcgcgaagggaccaccatgtatgatggccgggttgccttccaaagtttgtaccaaattcggtttgattgcatcctttaataaggccgccattgcaccgtgtgcgtgtagatcccgggcgtaaattggtttcttgtcgaaggtgtaaccgataaagatgttacccagtctgtttttcagatcctcgaaatcatccgacaagcaaagaatggccatcacctcggatgccgcagtaatgtcgaatccggtttcccgcgggattccggctgacgtaccacccaagcctacgataatatggcgtaaggaacggtcattcatgtccatcacccgtttccaagttactgtacgaggatcaatattcaaagaatgtgttttactttgaatgttattgtcgataagggcagatagcaggttatgagctttttcgatagcaccgaaatcacccgtgaagtgcaggttgatgtcttccattggaacgacttgagagtaaccaccaccggtggcaccgcctttgataccgaataccggaccaagagagggttcacgtagtacgaccgttgcttgttttcctatccggttcaatccttccgtaagaccaatggagattgttgttttaccctctccggcaggagttggtgatatggcagatacaagtaccaattttttgccgtctatctttgatttatcaatcaaacttaacggtaatttggctttatatcttccataaggttccaataaatctctgtctatgcctaatttatctgcaatctcgtaaatcggttttatctcgatcgagtttgcaatttcaatatctgttttcatgtttattaattttagtttcaaattccaagttacaagttctaggttaatttagttt

SEQ ID NO: 307 - DNA, 5559 bp, Butyricimonas faecihominis
gtttttattcagaaccagagattaaaacagatgcgatttacgggtaatctacctaaatatgaaaatattaataatgtgttgaatatattggcgttaacaacaaatattaaatttgaattgaatgaccgcactctagtcgtgcagttagagtgaatgaaaaacgggaacttgcgctaacaatttcccgtgtaagataactgccattggggaatggcaaattattaataattaaaacagtacaaatctatggaaaaaaatcgagattttgacataggatggggatctaatgtcattacgaaaatgtttcgaattatgaaagtctttatttgtattttgattctgggtctatcgaccgtttctgcaagcacgttctcgcaggtccgggtgagtttagacatgaaaaatgcaactcttaaagaggtgcttaaggagattaccaaagttaccgggtatgaattcgtgtacagtaacaatgaattggaaaacgtgggaaagatttctttgagcgtggaaaataaagatttgcaggaggttttggccgagtgtttaaaaggaacgcaactttggtatgtcattgaagatcaaattgtggtaatttctccgaagttaaaggaattctctcaagtaaaaaaagagaatcattcgaccgtggccagtggtaaagtaattgataaggataaaaagcctatcccgggagtaactattttgataaaaggaacgacgacaggagttgttactaatgttgatggcgtgttctttattttggttccggatacaacggcacgcgtggaactcgttttttcatttgtaggcatgaaatccaagacgatcgcctataaagatcgtccgaaaaagggagattgggtgattactatggaagaagatttgttggaaatggatgaggtggtggttacgggttatcaaaatttgaagaaatcgcaggtagcaggttccgtgagtgttattgatgcggcaaaggtaagattagggggtgtccctagtatagaaaatatgttgcagggacagattactggtatgaatgtgattattaattctggagatcctggggcttcagccaagattcgaattcgtggtacgtcgtctattttgggtaaccgagccccgttatgggtgttagatggaattattttgaccgaggatgacatgggcgagattaatatgacggatttgaatggtgatgatgccgcttatctcgtggggaatgccatatctggaattaatccgaatgatattgataagatcacagtgctaaaggatgcttcagctacggcaatctatggagtacaagctgctaacggagttatcgttattacgaccaaacaagggcaaacaggtccgccaaagatttcttattcgggaagttacgcgattaaccaacgcatggcctatagtgatttagagaggatgaacgccacggaacgtttacaactttcgaaagagattatagaagataactcatattattattccatgcctgtaaattatggctatgaagggttttatatagattggttggctcgtaaaatcacgtatgaagaatttgcagaaggtgtacaaaagttggctgatatgaatactgactggtatgatattttgttccgcaactcgtttactcatactcatgcattaagtttgagcgggggaaatgagggaactcgttattatatgtctgttggatatgatgatacacagagtacggcaataaaaaattatagtcgccgttttacgatgtctgctaaacttaattcttggttgctaaaagagaagctttatttaagttttcaagctaatgtttctaccaagaatacgcttggctttcattcttcggtgaatccgaatacttatgcttataacacgtctcgggcgataccttgttataatgaagatgggtcattatatttttatgacacgtataatcgttattatcgggattggggaaattatatctattataatattcttaacgagatgggtgaaacgggacaatccggacgagtgaattcaatatcttcacagatgaatttggaatggaatatctggggtggattgaaatataaactgcatttatcctatcagaatagtcattcgatgaagaaaagttgggcaacggataattcttattatgtgactaatgagcgaggttataatttggatttttatgaaacatacgtacctgcggaaggagataaaacaaaggataaaatcaaggatgattcaaaaatcccgacaggtggtatttatgataaaaacacatcacagtcagatacctatacagtgcaaaatacattggaatttaattacgtgataaaggaagatcatttgataaatttgatggcagtatccgagattcgccaaataaagacggatggtttgtctggtacatattatggttggttaccggatcgtggagagacgtttaatcctgctataacgacagcatatgtatctttgcttaccgggggaactcttaatccggtattgacaaaatcaacgaagaattatgtgtcgtggattttcactggatcgtattcatataaagataaattcgtgttgaatggaaatttacgtatggatggttctaatcagtttggttccaatcccaagtatcgttttttacctatctggtctgtttctggaaaatacacgttgagtaatgaaaactttttgaaggataatgatattatttcttatttggctgtacgagcttcgtatgggattcagggaaacgtggatagcggaacatcgccggatttagtgataaaagtgggctctcaaaataccataacggaacataatgaatctactatagcttatttgcctaatccggatttacgctgggaaaaaacagaatcgtataatatcggattggatgtgtctttgttggataatcggatttcagtcgtggcggatgtatataaaaaacgaggtactgatatggttatgactaaaaacgtgtcgcaaactaacggaatccagactgtcaagattaatgccgggagagtggataatagcgggattgaaattggagcaaccttcatccctttgaaaacaaaagactgggatatcgctttaggcattaattattcttacaatagaaacaagcttgttgaagccaatgaacacgcggtcactaatgatgataaattggcaggtaatgcattgattgtcgggaaacctttgggaacactttattcgtatgatcttgttgggttaaatcatgaaacaggttatccggtattccgtgatatacatgggaatacttcttttattaatgatgatggagaagataacccgaattactctctttgggcagatgaagtaaatcttgtaaaatccggggtgatgacggctcctagtcaaggtggtattaatattagtgtcggttggaaaggcttgcgtttaagtggaacttttacttaccaatttggtggggtgaatcgtctctcgaatatttacgggagtaactggaattacgtgtttaatcccatgacaaatgtgtccaaggaatatgcgatgcgttggcggaaatccggggatgaggataaaacggatatgcctgtactttataatagcagggtgtataataaacttacacatagatattatgtttcgggaaaagatgaggtggccggaacgacaatgtatgataaatcttcggttcgggtggcaaagactgatttcttgaaaatgagaagtttgtcattgaactatttgatacctcgaaaattcgtttccaagtggcatataacggattgtgcgataggattacaagcaaccaatttgttcacttgggctgataaacggtgggaaggttcagatccggaagcggcttttgcaacaacgccgttgacaagaacttatactttaaatttgaacataactttttgaaatgtggtcatatgaaagcgaaatataaattattcattgttatcatgttcattgggataacagtcggttgtgatgatttccttgaacgttcttctcaaaatttaattgttccggaaaccgtgaaacattataaggagttgttacaaggtgatggttattttaaggatttgtatgaaaagactaaatgggtcttatttatgactgatgatgccgaatttcaagaaagctattctcgtttctctgattattcgtttacctctgataatgtgactcattatggagatatttatacttggcaatctgagatagagaatgacaattttacggatgaggcttatctttatctatataaacaagtgaagcttgcaaatctttgtcttgaaggagccataaatgcggaaggtgaaaatgaggatcgggaaattttattgggacaatcctattttacacgtgctatggcctatttctatttggcgaatttgtatggacaagcgtataatgaagcccaaccgagtgatatgtgtgtgcctttggtattagaaccggatataactatcgtttctcctagtagggcaacgatttctcagatttggggacagatgacttcagatatagaaaatgcgattaaaaatttgaaagataaatcaacaggtgattattttaccattggttatgatgctgtccttgcacttgctactcgaatttatttgtttatggaagattgggataatgccataacgtatggagaggaattggtggggcgtaagccagagttgcaagatatcacgagcgaaactaaagcgactagttcaacttatggtagtacggataaagccgtgattaattttttccgtgcggataatcccgagattatttggaattttaataccgctccgacatctaatagtacaggtaaaacattttacgggctttttgcgaagtatggagtatatactgccgggtattggattgcgacatcttcacaatctttttatccgggacaaaaaacacttatcgagatgtatgatactgatgagacggctaaaacgggagatcgacgcttactttactggtttataccgccagtgaaaaagacttcgtcttcttatgcggatagttataatacgtataaaacattgaaatatgatccacagtatgataaacaaaatatgttaatgcaatgttttcgtactggtgaggtgtatatctctttagcagaagcttatgctcgtcgaaatgctgcgggggataatgtgaaagctatcgtgtatttgaattctttgcgtgagaaacgaattaacccttatacggcgttaagcttgggtgattttgtttctaatgatgctcttgtgcaattctgttgggacgaacgtcgtcgtgaattgtgttttgaggaatgccatcgttggtgggatatgcggagacaaggacaaaaacaagtgactcatcgttataactatggaggaacaagtggtgatgcctttgttacgtttacattacaggaaaaagatcccgcttttatattaaatttcccaattgtagaacgtaatcaatcgcctaatttggtccctaattcccgtcctactagaaatgaaaattaatgaatatttaataggaaagagatgaaaacatttaaatatatattagtgc

SEQ ID NO: 308 - DNA, 5520 bp, Butyricimonas faecihominis
cctcttctagttcttccagagtccccgtgtgattacttttcttgttgatccggtccataatcacggcaatcgcaccatctcccgtcacgttacaagccgtaccgaaactatccatcgcaatatacaaggcgatcatcaacccctgagccgtctcgtcaaatcccagcatggactgcaataaccccaaagccgccatgatcgcaccgcccggtacccccggggccgctaccatcgcgattcccagcatgaaaataaacccggccatcaccccgaaagaaatcggcatacccgacatcaacatgatcgccatggcacaagccacgattttcatcgtgctacctgacaaatgtatcgtggcacaaagcgggatcacgaaagcggccaattcccggttgacaccattctttatcgtttgctccaacgtcacgggaatcgtcgcagcagaagactgtgttcccaaggccgtcatgtaagccggcaacatattccggaacaaccggaacggattcttcttcgacacgatcccggcgataaagaattggataaacaacagaacgatcgtcaagaaaaatatcatcacgatgattttcacgaatacgcccaacactcccgaaacctgtccggaattcgagatgttcaggaagatgccgaaaatgtaaagcggcaacaaaggaataatcacccccgtaatcaccttgttgataatatccttgaaatcctccatcgctcctttcaacgtggccccattaatcaccgacattcccagacctagcgtgaaagccagaaccaaagaagtcatcacgtccatcaaagggggcatcatcaccgtgaaataaggagacaaaggttccaccgccgccgtttccagcggttgcaactcggcatctttcaataaccacggataactcaagtcactggcaaagtaagtgaagaaccccgaaaacagggtaaatccatacgccagcaaagcagttatcaacaacaatttcccggcccctttacccaaatcggcaatgcccggagccaccaaccccaagatcaacaacgggatgataaaaccgagaaaattactaaacaaaccatttatcgttaagaaaattcttaccagccaaccggggaagaaaagtccgcacgctatacccaaagctatcgcgatcacgatctttggcaataatcctatcttcttttttttcatacgcccatctaattatattaaaaataaccttacattcgcataacaatataagaatcatgagcctatgacaaaagataaatggcatggccacatagccatcttcgttgcgaacatcctctttggaataaacattcctatcgccaaaaccttaatgccggagtggattgatcctgtaggcctcacgttcctacgtatgtcattcggggcactcgccttttgggcggtttccctatttaccttaaacgagaaagtaagtaaaaaagatttactaatcctgtttttttgtgccattttaggtacaactgttaatcaacttacattcattgaaggacttggaatgacctcccctattgacgccgggttgatcgtcacgatgaatcccgtgatggtgatgcttatttcggcattggttctaaaagaaccgattacttccaagaaggcgggtggggtactgatcggggcctgcggggcgctattgatcatctggcaatcctacacgataaaccaaggacacggcggttcgttgatgggcaacctgctctgttttattagcgtggtgagttacgcaacttatctcgtgatttcgaaaccgatcgcccagcgctattccccggtcaccctgatgaaatggatgttcctgttctcaacgatcctcatgctcccgttcagcatgcacgacgtggtaaacgctaaactattctcggcagaaacttctctaagcgctctggccagccttttctacgtggtatttttcgccaccttcctcgcttacctgttcatcccgattgccttgaaacgcatccgccccacgacaatcagcatgtacaattacgcacaacccctagtagccgccaccctcgccattctcatggggcaggataagctaacttgggataaacctgttgctgccttgctggtgttcacgggagtctatctcgtgacgcaaagtaaagcccgggcggatatgggcaacggggcgaagtgatcgttaccggcctctattgcaatttgaaactgatgggtacggtcatgcttcttctcacgtacttctggtggagcggacaccatgcgggaataaatttcggggctgatttcacgatccggacagcctccacattaaggctgtaggcaccacctttcacgacttgcacgtttgaaacagacccgtcaagctccacggtgaaactgacaacaacctgaccttgccagttattttgtagtgcatccttcgggtatttcacattctcaccaatccacacggcaaaattcccttgagcgaacaagggtactcgcacgtaatgcacgcatttaaattcatccttctcgatcacctgaccgggggaacgggaaacggcaggtaagatatatttcataaaataacgaacatgatcgtctcgatccatcacctcacgtaattttgcctctttcagaatattcagatgggcaaatttcggggtagcaacgatgtatttatgaacaaatttcttgggtccgatttctttcaacattttcatttccatatcataaaaatgacggaacacgctctccaaaacgttagctgtcgttttttgtaaccccgcatgcttgatcacgtcaatcgcatacaggggagcgtattcatccgcccgctccactcccatacaccgccagttataggttcccctatcgcctttacgatataatgccatccgttccttcaaatgttccggattctcctcctcctgaatctccgacaaaggaatctttgcttcctcatccagcatttgaagatagttttcatacgatagtgaattcgtccgactaattgacacttgggcaaaagcactagcggacagcacccagaaacataacgaaagcataaaacctttcttccttaaacaactaataacaaacgccatagaacacaatttaattcagtattatctttactttacaaaaaactattgaagttggaaatttatcggagctgtataataaacagctactttccgtttatggatcggacatatcaccggagcgaaagagggcaaccggcgcatgacccgcacagattccgcatccaagctcgggtccacacttcgaaccacgtgaacatcggagatactcccatccgtattgatcaggaaacccacgaccaccttcccctgaatattacgctcctgtgccattatcgggtacttcacttctcttacaatccagttctgtatccccccgattcccagtaaagaaacattcagatgataaaaacatttacaggaacaaggctcgttattgtcgggctggtgggagattctcatttcttccatcaaatcacggaaatacaacgcgtgttgttcgggattcatacattcccttattttcgcctcttccaagatattcaaatgagcgaataacggtgataattccgcatatcttttcatcagatccttcttacccattctctttatcagtttatcttgctcaaggcttttccatttgtacacggcctccaattttttctgttgtcctttattcaacttgtactcccgaacaaaacccgcagacgctctcacattatacgacggactcatcctatcaagtgccaatttcaaagctcttcccccacccctcaggaattgttgtttctgtgccacgtacatctgtatgattgccggatccgtctcttcctgaatattttccaatgggacctttccttcccggtctaacatggcaataaactcatcatacgaataaggttcagccacggcataaaccgtcgtgttgccatccgaccgccccgacgcattcaagatccctgcattcaaaatacaacaaaatagaatcacgtacaatttataccacaccttagaggcaatctcaattatttccatttctagcacaatttgaacatacaatctgtataaaagtacaaataaaatggaataatcacaataattcctccaaataataaaaacacagcattttcacccgtatacaattatcttgaaaaatatcgcttattttcttggttcttcttattgggaacagacgcaaaagtagtaaactaaaaaatactgtaatgtttcatgaaacattacagtatttcttccaaatagttcgttcgaagtaatcggacttctcgacgcagttgcttcagttcctgttgcatttcgtgcatacgtcccatcaactcgtggataacaccgattccttccgtgttgacagacaaatcttcatgccaccggacaaatcgttccaagtcctgtaattgcgaaccaagcaagtagcgttcaccatcgacaacctgaatatcaattagtccatcttcttccagagacacgataaacaacggatccacgtgacttttctgacagtattccctgactataattaaatctgtttccataactcttccctttagctaagtttttgtaattcttggaataactccttctgtttttccgtcaaatttgtcggaatctccacagaataagtcacgattagatcaccgaactttccttcttccttgtaaacgggaaaaccttttcccttcaaccttactttcgccccgttctgggttccgggttttaccttcaattttactttaccattcattgtatccaccacctgttctcctcctaaaacagccgagtacaggtttaaaggagccgtcacgtacagatcgtttcctaaacgcttgaacacggggtcttccgcgatcacgaatgtgatatacaagtctcccgcaggtcccccgtttacaccgggtccgccttgtcctttcaatttaatcgtttgcccgtcagccaccccggccggaacggtaatacgtatatttttaccatttacagccaacacctgtttgtgtgtctgtgcggcatcatggaatgacaaatgcaattcagcattgtagtcctgtcctcggaacgcggcagaccttcctccaccccgacgggaaccgaataacgactcgaagaagtccgaaaactcgccatccccgcccatgccggagaacccgccttccgatgaccaatgaactccactcccgaaacctccaccgccttgctgttggtaacgctgtttctgggcctcaaactcgtcggcatgtttccagttctctccatattggtcatacttcttccgtttctccggatcacccaatacctcgttcgcctcgttaatctcttgaaaacgttgcttggcattcgggtcgtccggattcaagtccggatgatactttctggccagtttcttaaaagccttcttgatatcatcctgcgaagcacttttatcaactcctaaaatcttatagtaatctatataggccatacttttataatttatac

SEQ ID NO: 309 - DNA, 5482 bp, Butyricimonas faecihominis
gatataaaccattaaaataaagttatgaaagcagctttgttttttgaagataaccaactctgccacctcggtgaaaatatcgggaaaaaggcgattaaagtatctacaattacgacagaagatgataaggtcgtttctataaagaatagtgaagtgaaaaatcggaatatgaattattttatccagtggttagtggactgcggtataaaaatgatttacgtctccggtattgacgagaaaataaaacgattctttgaacaaatgaaaatcatcgtgaacgtgaaagaacagtctgataagagtcttttgttaactgaaattacttctcaaaagtaataaattggattttgcagttaatcccgggcttgaacccgggattatttttagattacttctattgcaattatttttactttatctttgctagacgataattacagaggaattgttatgtcattggaacaagtaaaacaatattttgatagcttgggtttagggcaacgggtgcatgaattggctcaatcgagtgccaccgtggaagaagcggctgttgccgtgggatgtgaaccggagcgtattgctaaaaccatgtccttcctgttgggggaggaaccaatattgatcgttacggccggggatgcgaggattgataataaaaaatacaaggaacattttcatcaaaaagcgaaaatgataccgggagagttggtggaacaatatgtcggacacgcgcccgggggagtttgcccttttgttgttccggagaaaactcgtgtattcttggatgtttcgctcaaacgctttgagattgtttacccggctgcggggacaagtaacagtgcggttgagttatctatcaaagaactggaggattgttcccgttcccgggagtggattgacgtgtgcaaggattggtctaaggaataaatcgactgggtttgccccaatgcgtgatggttagtttgtgtatggctcttgtcacggcaacgtaaagcatacttttgtctataagcgtgttgtagttggtgtcgttcgcttgcggaatgatcacctcgtcgaattccaacccctttgccatgtgggatgaggtgacaatgattcctttagcgaaagccgtactctgatgggataggaaatagaggttgtccgtgtacgatttgagtttctctgtgatttcttgtgcttgcatctcggttttgcatattatccccaatgatttgtaagtcgacgttctgaacgtgacaattaattccgagatggcggaaagttcttcttccgaattcttgaaagagaggacagttggttcttccccgtgtcgggtgatggcttccagttcttcgttcgtttgaattctttgtgcaaaactcgtgatctcgaacgtggatcggtaactcttgcagagtttcattacttctcccgtgacaaatgctttctgaatcatatcggcggttgatgacccataagggtttaccgattgacaggcatccccgagaatcgttttccgacaaggataaagtttctgaatgatcttgtattgtatgggtgagtaatcctgcatctcgtcaatcaaaaggtgtttgacccgggaaagggtaggagtgccctctaacgctatgtggagatatgccaagggggccagatctgcgtattccagcgtacggttcttgcgcattttgaacatttcgggtttcccgatccacgtgaaaaagtctttgtaaacttgaatgtcgttgttcccggcaaacatcttttgaatttcctttttcaacaggttcctttcggcagttgtcgctttgaaataatgtttcaaagacatcatttctaagatatagtccgtcatcgtctcgaaacgttggcgcatcgggtaacggttgaaccgtcggaattgttcatcgataaactcggccggaacggtaatatgtttggtcagtttgacatctgttgccttaaaatagttgttctccatgtaaagaacaaacttttctaattgcgagatgaaatcaaaggaagctttgtattgaatccgttcaataaattccggtgtcggtttatctagtaattctgttacttgttcaaagaaattttggtatttgtatttgttatcgagaacccccgaaaggatttgttccatgctggtttctggaaccgtttcttcgccgagttccgggaggacgttcgagatatagtcggcgaaaaccttgttcggggagataatcagaatatcttttgaagtaatttccccttttagcgtgtaaagcaaataagcgatacgatgcaaggcaatggatgttttccctgatcctgccactccctgaatgatgagcgtttgtgcttcttcgtttcggataatccggttttgttcccgttgtatcgtggtcacgatattcttcattttatcgtcggcattggaactcagttctttttgcaggatatcatcgtgaacggtcaatgaactctcgatcatgtactccatcttacctttgcggatacgatattgtcttttgagggaaatgtctccgtcaacctctccggagggggaagaataggatgcgttccctagttcatggtcataaaacatactggatataggcgctctccaatcgtagattaggttggctttttggctggggtcatagaacgtgtgaatcccgatatataatgccattgtttcgcatccctctttcttttccgtgaaatctatccgtccgaaatagggaatatccagaatctttcccagtcgtttgcgtttatcaatgacgctctcgcctgttgcaaaatgacgtaggatgctttctctcatggagcgtatctcgtgtggatcgatgtctttattcgaccacagatattccttgtactcttgtaacgtgtcaacgtgttccttgacggatttgtccgtgttattgatcgaatcgtttatagtgttgataatctgtcgtaaatattctttttcctgttcttccgttttgttgaataccatagactcctagttgttttaattaaaattgtgcgaaaagaggaacaaagttaatgcaacaacgtggagggggaaatagttatttatagctatttaatgagtttgatttatctattgtaatctttctttatttgttccccttgctctgttaggcggtatctttgagatctactgttgggtttatctggttttgtcatttcgataacaccatattctagtgcaggttttaaataacttcgccggaagtgttctctatctgcaagatttagttgttcttggagttctaaacgattcatctctcccgtcaatacttttaaaagttctttgacttgcggggtaacttgcggggtaacttgcggggtgacttgcggggtgacttggggggtaaccttttctaaagctgggaatgtcatgcgtaaaaagttctctgtgaatttgaaacattcttttccgtaactccttaaaatacgggggattcctgagcctagatgttctactaaatccaaatctctgaatactcgcatcaattccttgttgcggggtacggaatatccttcaaagaattctttttcggtcataccctgtggtaaacttccaaatgaagtgatttctattctgtcatcaaaaaattcaaatttaggaggtatttctgaagtataatcgttgtgtacgatggcgttaattaccgcttctcgtagggcgacggaattccataatcttttttcctctcgttcttttggggtaatccttgctaaggttttattttccacgttgatcttgtctaatacttgcttcgtcgctttgaccaacgagcaataaccgtattcattattctccattaggtctacccgatcaaccccttcgtatttggcaacttttatagacattccattcaagtcggctaataaataagccacgtaattatattgtccttcttcagagagcaattcaaggtttgatgtaaattgttgatttaatgctttgttagccccctcgtaatatatctttaattgttcaaaagtaagattctgattgggtgattttatcttgccaatagagttccggattcgtttggcaaagagtgattcaatcatttttacaggcattggttctgctgcagtcccgactcggatgaatgtgcctttttctgacattccaagcttttttatataataaggtttttccggaccactggcaaatgtaatttttattacatcccttgaatcaatattttccgtcgcgatatcgaataaccccatacaagatggtgtaatgttatttttcaaacgatctttgattttgagcatatcgctatcaatatcaataactccgattgctgtacccgttttttcaattccgatatagagtacccctccttccgggtaattgagaaaggctacggcttctttttctaaatcatcagtgagttcttgtttgtattctatgcggtttgtctcggaattcataaacttgatattagctttaaagatcatgattcttgtttcttacaaagatactattttgtagctgtttagtcaatagaaatgatgacaaatacgaattatttcaatagccctaattcgatccctttgttgatagcctcgatggaattctgtacttccagtttgtgtagtaagttttgtctgtgaatgtttaccgtgtgaatactgatttggagtttgttggcaatctctttgcttagtaagcctttttgaatcaagtggaatatttccgtttcccgctttgtcagatggatggtcggggaggataataatgccggggaaaatagttctccgtttctgagattgagaacggtacagtcaacttgttctgaattcttctgatccggagaaatactcatgttgcctagtataagccatgcttttcctgaaagtccttgttccaaaacttgcaatctgttggttacccttacatattgttgcttggcgttacgtacccgaaaactgtaaatattgcaataatcatttcgttgttccacgggcaggctataaatgaattgtcccagtttgatttgtaaatccactaattgatcgaagtcatctggatggaaccgggattccagataatctccctgcctttccaatgtggcaattttgtttgaatcatatcctagtaaatctgcgaaattagaggaggcatatacatacttactcttgtaaacatcaacaacaaacgtgcaactctgatttacttttgccatctggtggagcatggctttatcccgttcccacgcggcataatcaatgtcatgtatcgataaatgttgtctggcccacatttcttcccgagtgatattggttggcttcatgctgtattattgctaatggattaaaaaaacttgagatgattctaatacaaatataacaaagattcctcataaatgaactagtttttctattgagaaaacaagttgggtggtctgtgattttatcgaattttaaggaataagatatgattattttatagaagtaatgaatgctgctatat

SEQ ID NO: 310 - DNA, 5479 bp, Butyricimonas faecihominis
gtggataacatgaatgaagtttcattacaagttacccacttccattttgtttttaattaaggtcatactgggggatgtgaggttgaatagtctaatcactcgcctagcttgataaattttcaacttgtaccatctttataaaaataacaagctaatcaatcatcccctcccaacacttcaatggtatatattatagtatatatatcaatcaaagtgtatgagggggaatgaatgtttcctttttaatctttatcatcatcattctaaaaggaaaaggatgggagagatggatgccagagggggaaaaaggataaggtttatttaccagaagtgtagcatgggtataaaaaaagcaaccacttttcagtgattgcttgatgaattaaatatcaactagaattgtatccagtttcccactccttgccagttcttgtaaatgctgccataacttcgctgaaccttctcgaagtagatcatgattgaggtattcaatatcagttgaatgattgtaatgttccgttattttaaatggaacgaaacttggagattgctccttctcttttttttcttttttcttcatgttgttttgttttaagtttgtagtaaatgataattctctcccaacacttcaaactgttatttttaaaataaaagaggcctgaaagcctctttttatcgtctactataacgtttttttagaattgtatatccttacttctttgatgcgaaatacttccggtggaaaagtaacaggatgaacacacctatggtaatataggagtcagccaagttgaataccgggcgaaagaacacgaagaaatcacctccccagatcggaatccattgaggcagaaagccttcgtaaagcggaaaatagagcatatctaccaccttgccatgtaggaacgaggagtaccctcccccgtgaggaaacatagtagctacttgtgaataactgtcactgaagatcatcccgtagaatgcgctatcgatgatgttacctattgccccgcagaaaattaacccgaaagagagaataacccccatgggtgccttttctttgatgagacgtcccaagtaccaagcgataccccccacggcgattaagcggaatacacttaaaacggtttttccccacttgcctcccccgagttccatcccgaaggccatcccgttgttttcaataaaatgaattttgaaccagtctccgaagacactgaattcatccccgatcatcatgtgggtcttgatccagattttaacaacttgatcaatgactaatagggcaataataaaaataataagttttttccgcgtactcatctgtgtgataaaatttaaagcgactcttaatcgcaaaagcgattaagagtcttgtcccattttggcatccatactcaatgttgcatgaggtacggcgcgtaatctttctttagagatcagtttcccggttactcggcagatcccgtaggttttgttttcaattcgtactaatgcggcttccaagtgagcaataaactttgcctgcctttgagccagccgaccggcctcttctttggaaagaacagatgctccctcttccaatactttaaaagtgggagacgtatcggcgatgtcattcccgtcgctgccggagatcgaggctttcagcacctcgtaatctcttttcgccttttcgagtttctcaagaatcaattctttgaattcctgcaactcttcatccgaatatctagttttctcggccatagttgtaaagtttttgtctaagttaataaaaaatccgctatgtaatctttcccgtggaaaaatatccacttttacttgtaacaaggggaagaggttacattttctggatcttaataaacgtttgtatgtcgtcgatttcgatgggttgggcaccgtcctcggctttatctattaacgtaacgttctctgccagaacttggctggcgatgtacgccttgaagttctcgaccgcttcattgatctctttatgtttcccgatgtaaagatcaattttgtctgtcacgttgaaatcactctcttttctcaagttctggattcggttgatcaactcccgggcgataccttcttcacgtaattccttcgtgatattgatgtccaaggcaaccgtgagacgtccctcgttagctactaaccagcccggaatgtcttccgacagaatctccacgtcttccagcgtcagttccagtgtttccgttcccacttcaagggaataagttccttgtttctcgaaattgtaaatatcattctggttcatttcggctacgagagcggaaatctgtttcatgtatttaccgtatttcggtcctagggtcttgaagttcggtttaatcttctttaccaagatacctgccgtgtcggtgatgtattcgatctccttcacgttgacttccgacaggatgatgttcttcacggcatccagttgggtggtcatctcgtcattcaagatcgggatcaacagcttgcacagcggttgtcttacccggatttgaactttgcgtctcagtccaagtaccatggaagatatttgttgagccatgttcatccgttcctccagttgcttgtcgatcattgatgcgtcagccaccgggaaatctactagatgaacgtccgtcgtgtatcgtcccgtaaccttgttcaagtccgtgaacaggcgatccatgtagaacggcgcgatgggtgaggacaagattgccacggtctccaagcaagtatataacgtttggtaagccgacagtttatcggtggtttgctcgccaccccagtaacgtttacgggagagacgcacgtaccagttcgacaggttctcgatcacgaaatcctgtattgcccgtccggcccgtgtcggttcgtatttctcgtaagcctcggtgacctctttaatcaagctgttcaatagagaaagaatccagcgatcgatttccggtctctcgttaaacggaacttctgcctctgcatacgtgaacttgtctatattggcatacaaggcgaagaaactgtacgtgttatacagtgtcccgaagaacttacgtttcacttcttccaccccggcgatgtcgaatttcaagttatcccacggttgagagttcgtgatcatgtaccaacgcaggggatctgatccttgtttctcgatcgtgtcgaaaggatcaacggcattgcctaaacgtttggacatcttgtttcccttggcatcaagcaccagtccgttggatatgatattcttgaatgccacggaatcgaacaccatggtcgcgatagcgtgtagcgtgaagaaccaaccgcgggtctggtccactccttcggcgataaagtctgccgggaaatttgtccggttatcgatcaattctttgttctcgaacgggtaatgtacctgcgcgtaaggcatggctcccgaatcgaaccacacgtcgatcaggtctttctcccggtacatcggttgtccggtgggagaaaccagtataatgtcatccacgtacgggcggtgcaggtcgattttctcgtaattctctttcgagtagtctcccaccttgaaatctttgaaggggttctccttcatgattcctgcctgtattgctttttcagtttcttcaactaattctttcaccgaaccgatacattttttctctgtcccgtcctcgctgacccatatcggtaggggagttccccagtagcgggaacgcgagaggttccaatccactagattctccaaccatttcccgaaacggccttcgcccgtgctggcgggtttccagttgatggtcttgttcagctcgatcatgcgatcccgaacggctgtcgttttgatgaaccaagaatccaacggataataaagtaccggtttgtcggttctccagcaatgcgggtaattatgttcgtgtttttcgaccttgaacgctttgttctcccgttttaacaggatacttaaatcgatgtcgagagtcgtgtcgttttcggttaaatttggatcgtaagcgtttttcacgaatcgtcctgcaaattccccgtacaggtccgtgttgacgttatttttcaagtattccgggtcaatgtcttccatccggaacaagcgtccccgtttgtccaccatgggttgcttgctgccttccttgtcaattaattgcaagggggctatgcccgccactttggccacccggtcgtcatcggctccgaaagtcggggcaatatgtacgatcccggtaccgtcttccgtggtaacgtaatcaccgaggatcacgcggaatgcatcacccatgggttgcatccaaggtaaaagttgctcgtaacgtatgccttccaactccggacctttatattcggccacgatctggtaagggatcaatttatctccttccttgtagtcttccaaggtgatgccttcagcttttttgttgaagtacgcgctgaaacgatctttcgccatgataatagttaccgggcggaaagtataggggttataagttttcacttccaagtacgtgatgttcggacccacggccaatgccgtgttggaaggtaacgtccaaggcgtggttgtccacgcggtgaaatatacttcatcgctgaaagcaaacaatttttccgatttttcgtcccggatcactttaaattgagccacgcacgtcgtgtccttcacgtctcggtaacatcccggttggttcaactcgtgcgtgcttaatcctgttccggcagcgggggaatagggttgtatggtgtaccctttgtacaggaaacctttctcgtacaattgtttcaacaaataccataaggtttcgatgtaacggttgtcgtaggtgatgtacgggttgctcatatctacccagtaacccatcttgttcgtcaaatcttcccattcacgggtgaatttcatgacgtcggaacgacattctttgttgtagtcagccacggaaatcgttttcccgatattttctttcgtgataccgagtttcttttcaacccccaattcaacgggtaacccgtgtgtatcccaaccggcttttcgctcgacgagaaatccttgtaaagttttgtatctgcaaataatatctttaatcgtcctagccattacgtggtgaatacctggcatcccgtttgccgaagggggaccttcgaaaaagacaaacgaggggtacccctctctattcttcaagctttgctcgaaggtattgtttgattcccactctttcaagacatccttgtttacctgagagagatccaaacctttgtactcttggaattttttgtccatcgtgactcctgattttaagatattacttatttgcacatttaaaaaatcaagttgcaaatataccatttatttgtgaaactggaaatcctcttctttttttcgtgcattcattcttttagagggtgataaaagacgtttaggagtggaggtcatgatttgctgccgtttttctaaatcacttcaggatgaatagagtagcaatacatgacg

SEQ ID NO: 311 - DNA, 5454 bp, Butyricimonas faecihominis
ggtaaactcgtttgcccgtgtctataagtttcgtatatttgcactcgttaaaatatagaaggttttattttgcatgatgatatatgatttcaattaataatgtaagtgttttatttggagattacgcgttgcttgactctatctcttttctggtgaacaaaagagatcggattggtctgactgggcgtaacggggccggaaagtctacattattgaagatattggccggggtacaagagccttccgagggaagtgtatctgttccttccggattgaaaatcgggtatttgccacagacgaaagtgtatgcagaaggtaagaccgtacggaaagaggcggaaacagcgtttaatgatgtgctggatttacaggcagaattggagcgtttgcatcgggaattgggcgagcgtacagactacgagtcggatagttacatggcgctgattgataaattgaacgtgaagaccgagatgttgcatatgcgaggggcggataatatggatggtgaagttgaggtcgtgttaaaaggattgggatttcggcaagaagatttggaacggcggtgcgaggaatttagtgggggatggcgtatgcggatcgagttggctaaaatattattggcacgtcccgatgtttttttattggacgagccgacaaatcatttggatatagagtctatatcttggttggagtcattcttgcaaggttatcccggggctgtggttcttgtttcacatgaccgtgcatttttggataatattacgacccggacggtagagatctcactgggaaagatatatgattataaggtatcgtatacacgttttactgaattacgtaaggaacgtatcgaacaacagcaacgtgcttacgagaaccagcaaaagcagattaaggatacggaggattttatcgagcgtttccgttataaggcgacgaaagcggtacaggtacaatcccggatcaaacaactggaaaaaatagaacgaatcgagattgaacaggaagattctgcacgaatcaatgtgcgatttcaaccggcagtacgttcgggggatattgtcgtgagtgggcgggatttgagtaaagcgtatggtgatcatgtggtactgcatgaagtgaatcttgatgtgctgagaggagagaaagttgcttttgtcggaaggaatggagaaggtaaaacaactttggtgaagatgattatggatcagattccctatgagggaaacctgaagatcgggcataacgtgaatatcgggtattttgcgcagaatcaagctgatttgcttgacccttcgttgagtgttctggatacggtagatcaagtggcagtaggtgaaatccggaagaaaatccgggatatattaggggcttttctgttttccggtgaggatgtcgacaagaaggtgaaggtactttccgggggagagcgtacccgcttggcaatggtacgtttgttattagaaccttataacgtgttaatcttggatgagccgacgaatcatctggatatgcgtacgaaagatatattgaaagatgcgttgaagaagttcgaaggtaccgtgattgtcgtttcccatgacagggattttttgcttgggttggcagataaggtgtatgaattcgccaacaaggggataaaggaatacctagggggtgttgcgcatttcctagaggctaagaaactggaatgtttccgggaatatgaacagatgcaccctcgaaaattgcaacaggaagatgtcgcggaagaggagattgtttctgaaaataaaattgcttttgaggaacggaaacaatggaataaagagatcaaaaagtcagaagtgaagatcgagaagttagaagtggaaattgctgatttggaacaaaagataggggaggcagagggaaaaatggcagaaggcgtgattaatgatgagttattaaaaacttatgacgagatgaaaaaacgcttggaagtctgtatggaagaatgggaagaggagaacgggcatttggaagaattgaaagctagaaattaataataacgaataagatggcaaagtttaagcaagagtgtattttcggaattcgggccgtgatggaggctatacaggatgagaaggaaattgacaaggtgatgttccgtcagggaataaagggggagttgttccaacaattattttcgctggtgcgtgaacgtcagattcagttccagtacgtacccgaagaggtgtttaaaccgtttgccgggaaaaatcatcaaggagttttggcagaggtttctccaattccttaccaagatataaacacggtcgtggatgctgtggtggcggaaggggaaatgccattaatacttatcttggatcggattactgatgtccgaaatctgggtggaattgcccgtacggcagagtgtgccggggtgagtgccattttaattccgaataagaattctgcaaaaatatcttctgatgcgattaaaacatctgccggggctttataccatttgcctgtttgtcgggagaagaatctcaaaaagacgataaaagaattgaaacgaagagggttaactttatttgcagccacggagaaagcggataaattttataccgaagtggatatgaaagagggatgtatgattattatgggagcggaggatactggtattgatgaagagttgttagtattggctgatcaacaaattaaaattccccagtatgggaaaatagaatctctgaatgtttctgctgctgccgcaatccttgtgtatgaggcggtgagacaacgaaaatagaaatcttacttggtataaacgaaataaagcagacaagtgtctgctttatttcgtttatttatttgattaaagtcttcgatcataccaagaatctcgtttggtcaacttcaaatccctcaataaagaggatcggacgtgaatttcaaagttgtaagactggtgctgtccaaacggcatacagttgaatgtcatttcccaacaatgcaagtctctcgtgacactaaagctggttgaagttacttctttgtttttaatgtcatatcccgattggaacgtgagtttccatttaggggttaacgagaggtcacccgaaaagttgatgatctgagagattgtcggacttttgtaagggctaggtttggaataagtaaggttgtaactaatgctgatattccaaggtacgtcaaagtcgacgtagtcatcatagaatccgcctactaggtcattctttttttctttattttgtccgttatctgcggaaaaactaaaattggtagagatcgttgcattggttaaacgccctagttttccgtgatatttattatatcttacattatttgtatctatcgcgtaagggtcaatagtaccactgaaattcaaatctactttgttattcaatattttggtacgtgcgcttatggagatatttgaaaagttcatactgtcggcgaaaggattataagatgttgaaagtctgaaactctccaaaagctttacttttttgaactcttcgtctccggttgtatctttgtcatttcggactttcatttcgacattgttatccaaactgaaactaatactcccggattgtttgccgcctgtagtgttcggacgataggttaaaccttcgtgaatgtcatattctacctctttctctccatcgaagtagctctttttgtagttacccaagggtttgatggcgggggtataggatgccgatatggagggacgtatcatgtgtcggatggcgacgactttacatcccggtttgaacatgaacataccatatatggttggggtatacccgattgatccgctggctgaataatcgtgagagtagttcaatccggggacatcccgtgtgataaattgcccaccgttagcactcgtgtccggaatccatattttttcaatggttttgaggttcaagtacccgttgtaatttaaagagggagtgaaggtcacgtccttggcaatcttaaattgtaaactgatcgggatattgtgtttaaatccattactccagtctctttcaaaagaagatttgaacaacttgtcttctttggtttggatactatttcttaattcggcagaataagatacaccaatattatcataccatttcatttcaccgcttttcccttttttacggaaaggatagatttgtgtcattcggagactcaaattcggtaatgttatagcaatagaggtgtcccggctattctggctatgattgaacgaaccactcaaactgaacgggctttccggccattttttactccacgaaatactggattgctttctttggttggcaatcccgtccaccgtgttggcattatagtagttgttattggcggatgacatatccacggaagcagagaatgaactgtacgggtttgcttttccatcttgcgtgtgggtccagcgtacagaccagtctgatgattcctgataatcaggtaaccccttttcactgacatagtttttactgatcgtgaagttcagattaccgttaaatttgtatcttttacggtattgggttgcgtattgtaacccccaagaaccgttggtgtaaatatccccggtgatattcatatcaatatagtcattgatataaatatagtacccaccacccctcaagttaaatcctctcattcgttcctctccgtaagtgggcatgataattcccgacgtggctttttttgtgatcgggaaaaagccgaaaggaataaagatcggtaaaggaattccttccagttccaaattggtgaaaccgacgaatatctttttgtctttgatcatcttcgccttgctcatgtttagcccaaagtgaggatggtcgtgttcgtcgcaggttgtgtacataccgtgtttcacgcaatagacggagtcactcatctttttggttgtttttccttgaatataaccttctccttcctgggtgataatctcggttacgtaaccctttttcgtgtcaaaattataatgtaattcagtactttcaaattcctgaccaccgtctttaaatttaggtgtcccttttaatttcccgacagaatcgggtactccggttgccatggcaagttttttatccatgtcgagttcgatgtaatcggctcttaactctgtcgtaaggtatttcacgaaaccatttccgtatagatatacttttttctcttgtattgaaaatctgaccgaatcgtccgcgtcgtatttaacaaggtcatcaaatagaggtttggattgagcggagtcattgcgaatagtatcaatcgggattcctgcagaatcataaacgatacgaatgctatcaccgggttgtcccgttgtgtcaatggctgtgataaagagattttgtccgaaaataatctcggacgccaagccattcgatgagagtattatgggcagggcgatcattgttaaaatgatacatttcttaataaaaagccctgtat

SEQ ID NO: 312 - DNA, 5447 bp, Butyricimonas faecihominis
tacttgttcttaaatattaagaacaagtaactaagtcatgagtgaaaagacagaagttatcgacaaaaaagacattgtaattcgtttctcgggagattcgggagatggaatgcaattgaccggccagcaattctcggatgctgctgctttatttggaaacggtgtatcaacgtttccggattatcctgctgaaatacgcgccccgcaaggtacggttggtggtgtttccgggtttcaagtacatattgggaatgatcccattaaaactccgggagattttgcagatgtgcttgtggcgatgaatcctgccgctttgaaggctaacttgcgttgggcaaaaaaaggtgcaacgattatcgtgaacttggatgcatttaccgacaagaacattgaaaaggccgggtataaagaaaacccgctggaagatgtagtcttgcaagattataacgtggtccccgtgaagatcacgactttaacggaagaggctttgaaagacagtggtctggatcagaagtctatcgttaaatgtaagaatatgttcgctcttggtatgatttactggatgttcgaccgtacggtggatcacacgagagattttattaaccagaaatttgccaagaagccggaaattgcaagtgctaacgtgaaagtgttggaaagtggtttcaattatgcagctaatgttcatgctttggctgtacacttcaacgtggctcccgctcagatcgagaaaggacgttaccggacgattaccggtaataaggctacggcatggggattcttggctgctgctgaaaaagcgaatttacctttgttctgcggttcttatcctatcactccggcaacagatattttacaagagttggcgttgagacgtgatttgggtgtgaagacttatcaggcagaggacgagattgccggaatttgtacttctatcggtgcaagttacgtgggtaatctggctatcacgacgacttcaggtcccggtttagcattgaagagcgaggctgccggtttagccgtaatggcggagttaccattggtaattgttgacgtacaacgtggtggtccttcaaccggtcttcccacgaaaacggaacaatccgacttgttgcaggctctttacggacgtaatggtgaaagccctatgcctgttgtagctgcaagtaccccgggtaactgtttcgactatgctttctgggctgctaaaatagctgtagaacatatgactccggttgtcctgttgacagacgggttcttggggaatggcgctcaaccgtggaagattccttcattgaaagattatccttctattactccgagagtggctaaagaaggtgatgattataaaccgtacgctcgtgatccggagactttggccagaatgtgggctttgccgggaacgaaaggtttggaacaccgtatcggtggtttggagaaggtaaatgtaacgggagagattagttacgtgccggaaaaccaccagattatgactgatttgcgtgatgctaaggtggctaaaattgctgacagcattcctcaacaggagattttcggaaaccaagacggtggcgatgttcttgttgttggatggggtggtacttacggtcacttgtactcggtcgttcgtgaattgagagaagaaggtaaagacgtgagcttggctcatttcaactttatcaacccgctcccgaagaacacgggtgaggttcttggtaaattcaagaagattatcgtttgcgagttgaacttgggacagtttgcacagtatttgagagctaaattcccgcattacacgtattatcaatataacaaagtagccggattacctttcacggtagttgagctgaaagaaaaaataaccgaattattaggaaaataatcatggcagaacaatatacaccgaaagattttaagagcaaccaagagattcgttggtgtccgggttgcggtgaccatggtatcattaactccgtacagaaagccatggctgaattggggtacccgaaagaatcgtgggcagttatttccggaatcggatgttcttcccgtttcccctattacatgaatacttatggttttcatacgattcatggacgggctgctgctatcgcatccggagctaaaagtgctaatccgaaattgaatatccttcaagtttccggtgacggagatgctttggctattggtggtaaccactttattcatgctattcgtcgtaatatcgatattaccactttggtgttcaataacgagatttacgggttgacgaaaggacaatattctccgaccacgaagttgggtacgaaaactaaaacttctccctacggaacaatcgaaactccgtttaatccgggagagttggtaatcggtgcgcaaggaagattcttcgctcgtacgttggatatgaatatcaacttgagtgcagaagttatcgaggccggtgtgcgtcataaaggtactgctgttgtggagattcttcagaactgcgtgatctttgctgacggggttcactctgctatcacggataaagagatgaaggaagagcgtcaattaatcttaagacatggcgaaccgatggttttcggaaagaacaaggacaagggtatcatgtttgatatgaaggccggtaagttgaaagttgttgagattggtaaggatggtatcacgttggatgatattatggtacatgatgctcacagcgaaaatccttctatgcattggatgctggtacacatgaaagctccggaatatcccgtggctttaggtgtgatccgtgacgtggaaggtacgacttataatgatgcattggatgcccagattgagaacgtgaaggcgaagtcttctatccgttgtgttgaagatttgttgaacagcggagacgtttgggaagtaaaataatggtttttaatatgtagaaaagtccgagtttaaagctcggacttttttgttttgttatttggaatggggcatggatgcaatcccccaacgggtatttggggtagagtccatttgtagtttcaagtgtccgccgtttataatttcccgacgatagaaccagcaatcttctaacggttgcccgttgagtgtcgcggactgcacgtaataatgatcgggagcgttattttctgtttcaatcacgagtgttttaccggaatagtaccggggatcaagtttaatcgtgattttgcggaatttaggactgccaatttggtaagaaggggtgatgttggttcctccctgtacgtcgaataaacccacggcagccatgacataccaggctcccaattgtccttgatcttcgtcctgtccgtaaccgtaaccgtgttccggtgtggtaccgtagaactcatcacagattaaccgggtgtatagttgtgtcaaccacggtttgccggaatagttgaatagccaagcatcgtgcaggcagggttgatttccttgattgtatagtttctcgacaccggaaaaactatcaatctcttttcccccaccgaactgtgttttccgggattcgacaaacgtattttccagtctttcgttgaagagatcggttcccatgaggtttatcaaaccttggatgtcgtggggaacataccaggtgtattgtgcggcattcccttcttggaatccttgccagccttttagagggtcgaagtctttcatgaaactgccatccatttcacggggacgcatatattttgtttccgggtcgaatagatttttgtaggcgtacgagtattgtatgagggtatcgtaggcggctgttttcccgagagctctggccatttgtgccgctgcgtaacaactgaaggcgtattccagcgtgtgggatgccccgaagttgcagacccagttattgggatacagataatctttcaaaggaacaaaaccttgtttgataaagtattcattgtcgtatttcccgttccccatatcccgtcctttgtattccagttcgtttttacagatggcactccaggctgattctatgttgaaatcacgaattccggcttgataggcggcacatatgattaatccctggaaattggtttgtaccccgttcgtgtatactccggcagcttccccgtcgtgtagccaaccggaatttttgaagaagtccagatttgattttatgtagctggaaaatatttcaggataggctaacgtccatatttgggtgaggttccagaaaccgccccacatcccgtcggtattgtgatgagaatagagcggaattccgtttttgtccaaagggatctggccaattgttttatcatgttgaatgtactgtccgtttatatcgttggcaattcccctgccgagtagggtatggtagagcccggtatagaatttggttttatcttccggggttccgccttctacttggatgcgaccgagcatttcattccaggtttgacgggcggcatttttcacgtcattgaaactttttccggcaacttctgtatcccggttgttacgtgcgttttcaatgctggtataggataggccgacttgcatttgtacctgttcatatgcttttgtcgggaaggtgagatatagcccgcatccggggccttttaccgtgttggagttttcttgtaccttctcgtcaataaatgttccgattgtttgcggttgcttgtccagtttggcggcaaaatagatttttattttcccgtccggctggcagaatgtggtataaatcgggtagttttccacccatccggtcacttcgttggtttccggatggtacgtgacttccgcatccgtgatggtggcactttctccttgtttatgcccgatatcaaacagtattcttgacgtggcggattggggaaaggtatagcggtgcaaacccgtccgggtggttgccgtgatttctgctttgatattgtaatccgtgagagttacggcgtaataaccgggagtggatatttctgtcgccttgtcgatgcgtgaacgatatccggaatccggatcttctaatgtacccggtaaggtttttaattccccggtggtaggaatcgttactacaccgcctatctggaactcgtgaaaatgggcgaatccttcaatggaagtatgtcgatcatcatatccacaaggaagccagcttccatagcttccgtaagcattcgtggtcggggcgagtttggccattcccatggggagtgcggccggggtatagaagaaccaacgacaatgtaccgagccgatttgcggattaacccaatctaccggttgtttcttttccggggtgggttggcatgaataaaaacctagaatcagtaaacataggctaaagagacgggttgtagtttgcatcttatttttaggttaaggtgattttgctgacaaatttatctttttttacttctttattcattaaaaaagaataaatttgtaatgtaaagagtctgtctcttatacacatctgacgctgc

SEQ ID NO: 313 - DNA, 5439 bp, Butyricimonas faecihominis
acttgtaacagaaaatagaattgaaaatgctttatacaatttattgaatgtcaaatctagtaaaccaattttaggaaactacagatacccaaaggcggacaaaggggcgttcatcgaacacttttaattcccactaaaacattgccttcccatgtgccgtgtaaggaacatttattcccaatatcttacacaaagtaggtaataaatccgacatcgtgtagttccctttcaaatcggccttcactcccgcaccgtataaatacaggggaacaatcggacgcttggtatgccgaaaataagtatcctccaactctttcagttccgaaacccaagtcggatggatacagaaaaagacatccccactacgtttgtgagaaaacgaattctgaaccaaccgatttaccccttccgggaaggaagtgtgcgttaatgaataggctgtcatgactttggctaccccttcgaactcgatcataaaatcagccactttatcctgcatttctttcagatttatcttcttctgctcgatcagatcccggttcaaatagatttgtccctgatcataatcggaaatccagtcacccggcccgtaaaccaaacccaagtaagacttcaacaaggccacagatttaaatatactaaaataatcagagttcactttaatcttccgcaaatcctccggcatcaattcccgcatctcggaaaaggtcacgaacagcgtgtagtttcctttcccgacccgggtatccaacttacttaccaatgccgcaatatccatatccaaacggatcaacatatctttctcctcgctcgaatctatcgtgaaatcccgggacatatagtctaaacaggaaaagttcaaggccagcaaatccggatcattatccactcccaacctttcctcgtcaatcaatttttcggccaacacacgtaccaatgtattcgcgtaaggtgtagctttcaaaacccggtaagtattatattccttctttgcccgggctatatcataatagaaatgattcgtcaggcgaatacgggcagccgacttatcctcgtcagacaacatcatccatcctttattcacgaaatgatcgctctcgacccatgtattatacattctcaaccattcgggtaattccgaacgataataagaagaggacacccatttacccgttttctcgctgaaccagatggccatatcggcactacttcccccacttagaacagcttcgtcaccattcatggcaatactgaacacccgggacatgggattattccatttcatggcgctccccaagctcatcgtctgcaaataatcgggagacaaactttttatactatccgcctgttgatcaccgatttccgtataacgatcggatcgagtagaatactgacgtttccggcgtaaacgatcgtaccacgccctcgacacgatcccatgttctgtgggtaacatacccgtgtaaatcgatgcgtgatccaccccggtttgcgtgtaaaaatagttataattcatattcacccggactccttgtttcatgatccgtttcaaaccattctccgacaattcgttagcatacatatccatccattctggataaaaatgactgattaccactcccactatcaatttcggtttttcttccgcgaaaacaccagatacccaagccaatacactcgctaataacaacaactttttcacgatcgtttctattttataaattcgtatttctgatcccaagtttcaaatcctcagtatagacacaaaaataatcagaatatgataatttacaacttataattctttcaattcttaattgtttcgtatctttacggcaagaatctataataaccatatccattatgactgagaaaaagtgccagttgacagaaaaactgaggaactatgtttatcgctacggaactgaattatcggacgataaattgaagaaaatgggaacttctcttgaggagattaacgagaatttctcagacatggaagacatcgcaaagagtatcttcgagcaagagcggattgcttttgaaaagatattcaaagaatacgatttcgacggatggaacgcgattgacattctactactggttggaaacgagatccaccagcgcttttttaacgtgtcaccttccgtcagctacaaattagccgaggcgttcccggaactattcgaacagcacaagctggaacgttctaattttatctacgagaagattaaaattaacatcgagaagggaatgcaacaaggtatgtataaaaacgacgtatcaagtgaaatggttgcccgcatgtatattgccaaactgaacgatattcacaatcaagagatctaccctcccgaagtctttgatttcgctaccattttcaacaatttgattgacggggtaatcaaaaccatcacgaacgaggatggatggcaatattacaaacagcgtaaacaactgtacagcgtattaagttttaacaggtaaaaagaaaacaatgagtgcaaaatatcaaattgatgacatcgatcgcaagatcttgtctcatcttgtaaaaaatgcaagaatcccctttttggaaatagcccgggaatgtggcatatccggagccgccatccaccaacgcgtgaaaaagatggaagactccggtattatcgaaggttcccgttttatcgtgaaacccgatgcgcttggttttggtgtatgcgcttttatcggggttatccttgaccacgctcacacctacaagactgtcgtgaaagagattgaaagcatcccggaagttacagaatgtcactttatcacgggcggttttacctttttgattaaattaagatgtaatgatcaccaacatttgatggatattctgatcaacacgttacagaacatccccggtatcgctaaaaccgaaacattcatctccttggatcagcttatcgagaaacagatagccctatccccacaggacaaatagtcgttttaagttaaatcaaaccgtcatatttttcttcttcctggatagttttggggcaattactttcaatactccaggaagtacttttacctttaccggagactccaaagtatacgggtctccatcaatatgagctttattcaagtctccttccaaaatcgcctccctgcattggatttcgctaaaataaggaagtcgagcgatcttggaattcataaagcaatagaggaaacgaggtatttgataatatttaggcctcttcaaaatgcaaatatcaaccagcccgtcccgtaacgaggctttgggggctatcgaggcattatttccatactgggaactattggcaacactcaaaacgaaacaatcttcctcccacgttttcccatctatatgaaacacgtaacgcttaccggggtaacgaaaccacatatgcacgatcgagtagatataagaaaatattccccggatcttcatggtactaaaaaagtgtgccacctcggcatcaaagccaaaaccactcacgttcaacgagtaatggccattaatttccacgacatcaatatccgtggtctcacttttcaaaatctgtttcaacgctttattcatcatctgggaaaaacctaaatgacgggcaaagccgttaccactccctaaagagatcacgccaaaagcgatgcccgtatttatcagggcagtaccgatttcatttactgtaccatccccacctgccgcaatgatatgcgtgtaattctgatgcttggcctgctccacgatctcttttgcgtgtccggcatattccgtgaaacgtatattgtactcgatgtgtttgtacgccgcaatatgccttatccggtaaggaatctcccagcccaaaccgaatcccgatataggattcacgataaacaatattcgataatgaaccacgtgttaattttagatttaatgattttagattctggcagcctaagctgccactaacatagcgccacacagatcttatgacctctctcccattttcaattgctaattgtctttccgtccgattccgtaatacatataaccgaattctttcatctgttccggactgtatatatttcttccgtcaaatataatcttgtgctttaatgctttttcgataaaagtaaacttgggaatcttgaattcagcccattccgtcaccacgatcaaggcatcggcatcggtcaacgcatcatacatattatccgcgtattcgatacgatcaccaatccgtctcttacactcttccatagccaccggatcaaatcctcgtaccacagctccggcccccactaatttatcaattaacaccaatgaaggagcttctcgcaaatcatccgtacccggtttaaacgacaatccccacatggcaaaacgttttcccgtcaaattcggcccgaagtgtgaagtgatctttcggaacaacacgctcttctggttctcgttcacccgctcgacggctttcaacaattccaagctatgcccgtgatcatcccccgtgcgaatcaacgccttcacgtccttcgggaaacaggaaccgccataaccgcacccggcattcaagaatttcttcccgatacgggaatcactaccgatacctttcttcacggcttccacgtcagccccgacaatctcacacaaattagcgatgtcattcataaacgaaatacgggtagccagcatcgagtttgccgcgtatttagtcatttccgccgacaatatatccataaaatagatcggtgtattattcaatataaaagcatggtataaacgttccatgacccgacgggcacgatcactctccaccccgatcaccacgcgatccggagagataaaatcgttcaccgcatccccttccttcaagaattccggattagaagccacgtcaaatgccacctcgacacctcgtttttccaaagctgcttgaattactcctttcaccttgtaattcgttcccacgggcaccgttgatttcgtcaccacgacaatataatcatttatgatctccccgatttcacgagccacatccagcacatagtgcaggtcggcactcccatcctcatcaggcggggttcccacggcaataaaaacagcatcagcatccttcaatgcctctctcaacgaagtagtgaaaaagaggcgtccatcttcccggttccgggtcaccagctcggccagtccgggttcatatataggcatacccccatgattcaacaactcgatcttgacattgttaacatcgacacacgttacggttactcccgtttcggctaaacatgttccagacacaagtccgacataaccggttccaacaacagctattctcatattatctattttacctcccaaattagggtctgatttttcattttcgcaaaaatataaatttaaaacgaacaataagttcccataccgtttttttatttaattttgtcttaatgataaat

SEQ ID NO: 314 - DNA, 5401 bp, Butyricimonas faecihominis
acaaggaataacgtatttggtactaccagatgctaattcgttgtttacttcccgaaacgttgaataaaatgaatgttggcaggttttctggctttctctgtcatccggtggccttcccattcatcactgaacagtggcatagcagtgccggatcattaaataagagattacagctgcgggtacagccccggatttacaccggattccctaatgggtaattagataaaaattacctttgctccaaaattcgggtgcaaaggtaatacttttcgaaaagggtgcaaagagttatagataattaagaaatgcctacttttcgtatttttttctattctcaaaggattttggcgtgatcttgttgatgttggaggctcccgatgagtgcagggagaggatgatcggatcaccggagtatgtagcttttgcggcaccggaggtgtgtagactgattttttctttgacttgaaaatgagcttttgcagctcccgatacttctgctttcagttcgtttatcggaaagtcttccaggttcgcttttgaggctcctgatacttccattttgcaatgtacggtgttacctttaagagagaggtttgatgctccgctaatgtcgaaggttgattcgggactggtcatttgtcctttgaggtttgaggctccacttagttcgatgttaagtttttcttttgctaggaaatctccacctacaagcattttactggctccggagaggtccacctttagcttggctgtcatgaaatccccgatggtttccaatttacagactccggttaactccacattgtcaaggctggtaaaggtaatctctgccgtgaaacgatcatcgtcattgtttcttttgtttttggtggtgattttcccatcgatgtagatatgtaatttcccatcggaatctagtttcagaacgagttgtttttcaagtcgagctggaatgtttacggtgactccggtcgtggtaccttgtttagccgttatactgaagattccgtgagcctcgattccggtaatcttttgtccttggaagcgggagatgctgatttgttcctgtgcgaatgctccggttattgtgaggcagagcatgaaaatgacaaatgatatttttttcataatgatctgttttatgatgggacgcttaaaggtaacgaaaagttacaggactcggtaggaaaggagggaattttattatatcatcaatgtttccagtaaggtgttcaagttggaggtgaatatttttaccgacatggcgagcaggatgatcccgaagaatttccgtaaaatgtagacaccgccttttcccaatactcgttccacgagatagacgttacgtaggacgatatatacgacaagcatattgagtataatggcaataataatgctgaacacgctacattctgctttgagagttaaagtcgtggctaatgctccggctccagcaatcagtgggaatatgacagggacaattgttgctgatccttccgggccatcattctggaaaatttctatgttgaatgtcatttcgactgctagcacgaaaaggacgagcgctcctgcaagggcaaatgaggagatgtcgatgttgaatagtttcaagagtccatctccggcaaacaggaacgtgatgaatatcgcaagagatattcctgcggcttttcctgcattgacttttttacctgcactgttgagcccgataataataggggttgatcccgtgatgtcgatcacggcgaaaagtaccataaaagcggtgaatatttcttttatattgatgctaaagtccatgtttctattttctgcttgcaaagataaagataaaaactgaaattaggagaaaggaagaggttttgaaaaaagtcgtatatttgtgatgcccgggtgcaaaattttatttggtgtcaatggatgatttgaatagtatatttatccgtcaaataaacgaaaaacaggaaaaagcttttcatgagttgtttctgcgtttttttaattatctcgttgtgtatgccatgaggcgagtacagcgacgggatgtggcggaggatattgtgcaggaggttttcgtgaatgtgtgggagggaaataaggagtttaactcgtatgtcggtttcagggcttttctttataatgctgtggcgaatagatgcatggattatttaaaacatcaagttgtagaagaccgatatgctgcggcggtcatgaaagaggagcatgaatgggatgagctggatatggcagaagaggagatgtaccgggagttacatctcgtggtgcaggaattgccggagcgaagtcgtgcggtgtttgaattacatttggaagggaagaagaacgaggagattgctcaattgcttgctttatcagtacttaccgtgaaatcctacaagaaaaatgccatgcaatatttaagaaagcgcttgggtgatgcacattttttattattagtcggtacatttttttaaatcggataccctctttttgttttcgtggtcgtattaggagtaaaatatgatcatagatatggactataaaaatgaaataggtcatttgcttcaaaaatatttctctggaacgatcatgccggacgaacagcgtttgttggatagttggatgaaggagaaggaagagcataagcagttgttcgatagattgcggaaagatactcgtttcgcggaggaatacgggatatttcgtgaggtggatacgactcgggcttgggagactttccgtgtgaaaaacgggctgaggcgacaacgacggatgactacatggatcaaatatgcggctgtaattgcattacctttgcttattgctggggtatggctgttgtttcctcgtggaggagagcgatcaataccggtggctcaaaatacgaaaatcgtgaaacgggaggagagtcctgttttggaggttgttggtggaggtaaagtgatactggagaaggaaaaggataaaatgatagaggcgggtaggggcgttgacgttcaacaaagttccggaatgctggtgtattcggattcggttgtgtcagagtatgtggatacgaatgtgttgaggattcccaagggtggtgagtttaagttacaattagcagatgggacacgggtgtatttgaattcagcgacggatttaaggtatccggtggcttttaccgggccggaacgacgggtgtacttgaaaggagaggcttatttcgaggtcgcaaaagatgtggaacatccgtttatcgtggttacggatgatgtacaagtacgggtgtacgggacttcgttcaatgtgaatacgcttggtgctgatggggttcgtactgtgctggtggaaggaaaagtagggattcgaggtcaggatttggaccgggagtacgtgttgaaaccgaacgagcttgcattttatgaccggaattcccgtgatatgaaaattgaaacagttgatcccgatttatatactctttggcgaaaaggaattttcgtgttcgagcgggagacattggaaaatatcatgaatactctttctttatggtatgacatggaggtgtttttccagtcggagagtgccaagcagttgcatttttcgggacatatgaaacgttatgaacagattgaagatattttgcacgcgataacggatgctacgggggtcgtgtttacgataaacgatagaaccgtatgtgtatcaagataaaacggaaggtcggcaaaccctccgtctttatttcaaaaagacaataaacctcgcattggaaccgtgagggtttattgaatgttgaatttattaccacaaatgtatgaaaaaaaaacgattatgttttcgattgccacggggcatgagagaaaaaattgaaaaagtgatgaaacttttctggattttaatgtgtgtgttcaccttttctgtttcggcggaatcgcttgctcaacaggaaagagtcagtctgaatctgaaagacgtggcggtacgggctttgtttgacgagattcagaggcaaacgaatctgtattttgtttttaacacggagttgacggatcggctgggacagttgtccgtgaacgtgaaggacgagacggtggaaaacgtgttgcaacagattctgaaaggaacgggattgacttacaagttccggggagatctgatcgtgattcaacaggaggataagaaagaggatgtaaaaaaaggcaagagaatagtcggaatagttattgatgagaactcgggtgatgttttaccgggtgtaaccgtaaaattatgttcggaatcttctgtggctttagggacggcgacggattatcaggggcgttttgtattgacattgcccgtggtcaagggtgcattggagttctctttcgtgggttacgagactcagaaaatgaattttacggagaagacggatagcttgagagtggtgttgagagagaaaatgaacgagttggaggatgttgtggtgaccggttatcagcaaattgatcggcgacatttgactgcagctgttacgactgttaaaatgagtgatattgatgtcccgggcgtaaatcgtatcgaccagatgctggaaggacgtattcccggtatgacttttatgcagaatagcggtcaggtgggagctactccgaaattgagaatacggggaacttcttctattttgggtaatcaggaaccgttgtgggtagtggatggaattattcagcaagatccggtgaatattgatccccaacagttgaatgatttggatttcgtgaatttgttggggaacgctattgccgggttgaatccggatgacgtggagcagattgacgtgttgaaggatgcggctgccacagcattgtatggggtgcgggctgccaatggagttatcgttatcaccacgaaaaaagggaaggtgggtcccccgaaattatcatattcgttgacaggtacgttttctactcgtcctcggtattcggatagaggggtgaatttgatgaattccaaggaaagagtagatgtttcccgggaattgatggaacgaggagttcgttatactggtgtttacaatagttttacggattggattgggtacgagaaggcatatctggattattttaaatatggttctattagtttcaatgattttaaagagcgttccgcttattacgagacgttgaataccgactggcttgatcttttgtgtcgggatgtgttctcgcataatcactcattgagtatcagtggaggaaatgagagtgctaaatattatgcttcttttggatatgcaaatgaagaggggaatattaaaggggagaagaatgagcgttacacggcaagtgtacgagtaactgtgcaacataagagattgcaaatgcaattcggcgtttccggtaatgttcaggataaaacctataatcctagtgatttaggt

SEQ ID NO: 315 - DNA, 5381 bp, Butyricimonas faecihominis
ataccgaatccagtccgccaccctcaacgccggtcccgggtccaccttcctcgatgtcacatcagaatgtcccacgatgtccccgataggataagcatccaccagcaaaccacacacctcgttcaacacctgcatctgcacgtccgtgtaatcatgccaatatgtcagcatttcacccgaatcttccgtatacacctccttcacgggaacttcccgaccacactccgccacgaactttcccccttccagtcgcaattgccccaggttatccagctcgatcccaattgaataatgattcagctcgcaccttcccccgtaactactcttccccgcatgccaagcctcgatattaaacggcaccagttgtatcacctgcccatcccgcccgatcaccacgtgcgctgacgctttcacgtccggccttaccaagaattttgccgaagacatggcactagtacctcccgtgtaatgtaaaataatcatatccggctctcccaatcctcgcctattcttctcacacacgacatgaattactccaccacccaccaaacgatggtttacaattgaaaatggtgaattagaacttgaaaatacctccataacaaaaagtttaaaatttagagtttagagtttagaatgaaaaagattccgtgattgccgattcgatgattgggtgattaaaatcacttaatcgaaaatcattaaatcacttaatcgataggatctacaatcatcaaatctaaaattagcgtggctttcgtgcgaatgcctgcatgattttttccccacttctccccaccacgtacccgcccaacccgatctccaataaatcccagaaccgggaagtttcatccagaatcggtaaactggtaaaagtcccgatcaaaataacactggcaaatgtcaacatcaccagcggacgccacgaccgttgcaaccaattccccctcacttcctcctgtaccgtgaccgctctcgcctgtgctaattctcgttccagttcctgaatcaatttcaacaacccggtttccagctcttttttctccctcgccgggagcgttaattgaccaatcaactcgctgaccgaattaacaattccacttatcggtttcattccccgttcacaatttaatgtactgcgaattcgagaatcgtttcccatccggggactcgaaaaaacaatacaaatgtatcctcacccccttgccacgctctaacgggaaaatcgccttttctgccacccgcaacacctccaccccctccaacaacttcggactaaatgaacgattcgacggaagcacgataacattcaaacgatctgccgcctcaaaattgtacgcctcctcgtcattctcccaatctagcgtgaccattccttgatcatccattctcccctgcagattatatgcctgctgtcgtttcccggcagaaaaatgcaattgtgaaaaatcaccgatctttccgtttgcccgaaatgccttcaaattctttttcataaaaagcgcatacccactactacagatcttgtcagccgaaagatccaaaatacccttcaagggagtctcctttatcttcttgtaaaaacgcacggccacccggaaacgggatctcacttcctgttgtttcggtgtgttagggtcaattctatcgggcaaactcctcatataagacttcccgttcagcttgcagaaaacgacatttccgactcgcccccttattccaaattcattaagcactaaagccacaactctttttttaaatgaatactacttttatctcatcaactctcgctgatttccgaatgcaatattacagctattcgcctccccgcttgttatacgccacggttccgtcaaacaaaataatcccaaccctatgattaccaatattcaaaaaagtactcatttcccactttcaagacaacaaaaaagggtagcaaaagtgttttaaactcttactaccctaaaatcttagcaacttttcactctagattctaaactctaaattttaatctacttgtaaacctgtgtcctcaatttctcaatcaatctctccaattgatccaaaaccgtctcctccttataccgtctcaataccctgcttttcaactgccgataatttttgatctggatccccaaaacctgttcagcaatagccactaactcgcaaaactccagcaactttccagtcggagaataaaattcttcaagagcctcgaaaccaatcaatagttccatcacttttgtcagcacattttccgtcttccagtacaccaacgccttcttctccttatttttcaggaacctctccggattatccatcttctcgtgaaaaagcagccattcgtcctcaaccacttgcaatcctcgcccgataaagcataaccgacacgcctcttttttcccccaccccatcacagtccttgtacatctctaataatgcctgcaatcgagtcttcgtgtaattcaacgcacggcacgtcgacaaataatcctctcccgtgtcgcatagccccgcaacctcttcaacaaattttcctaattcttcctctaaactttctttcgtaatttcctcctgtgattctcctgccaataatgcaaagaacctcgtctttaacaattctgtcatagtttttaaatttaaaataataaaaaatcccgggcgttattacccgggacatattcttaatttaaaaatcggaatcaggaaatcacatcatcatacctcctcaaatctctcaaccattcacccaaaaatcatcaagctctcaatctttcaatctaatatttaaaatctaaaatcagaaagctgtttcacaactttcgtaactctctccacgtcctcatctgtcaacgtcggacccgacggcaagcacaacccgatctcgaacaaacgttcacttgtcccatttccgtaatacggggcatctttgaacacgggttgcaagtgcatcggcttccacaacggccgactctctatattctcctcatccaatgctaacctgacatcttctctcgtgaaacccgcctcttccggttccacagtgatacacgtcagccagtaattcgagttaaaaccctccccttccggctggcacatcaccttcacacccttcactccggctagtaacttcacgtacaagtcatgaatcgcccgtctccgagtaacgtgctcatccagcacgaacatctgtcccctcccgattcccgcacagatattactcatccggtaattataaccgatcttctcgtgctggtaatgcggggcttgttcccttgcttgggttgcgtaaaataatgcccgtttcgctttctcctcattgggacatatcaatgccccacctcccgacgtagtgatcatcttgttaccattaaatgacagtaccccgtattctccgaacgttccacatttcctccccttgtactcagaacccaaggcttctgccgaatcctctaacacggggattccgtaacaattcgccacctccatcacctcgtccattttccctggcatcccgtacaaatgtaccggaataatcgccttcggtaactttcccgtcttttccaaccgctctttgatcgcctcctccaacaacaccgggtccatattccatgtctccttctcactatccacaaaaaccggagtcgcttccaagtaagcaatcgggttcgctgatgccgcaaacgtgaacgactggcaaattacctcatctcccggttgtacccctagtaatatcaaccccaaatgtaatgccgcagtccccgcactcaacgccacgattcgcattccctcattttcaatttgcaaccctccatctccaattaaaaaatctctaagagatttttcaaaagcatttacatttggccccaagggaaccacccagttcgtatcaaacgcctcttgtataaattcctgctctcgcccgctcatatgagctaaagaaagccatattctcgatttcatcttaatttattattttatactcatttcaatcatatccaactctttaggttttttgaagtattgttttccaaaaagcgtcataacaataacgaatgcagttttcagtattagcagcatatcatataacaaacctcgatttttcacataatataattccaatgccaacttttgtggaagaaattcagtttcatacaatttttcatcttcatattgctctccatgagtataatcataaagactagcaggactagtaagtcctggtttaacatccaaaattcgcttatactcaccatgatataaatttctaacatttgcgacatcctctggtcgagggccaacaatcgtcatctgtcctaataaaatattaaatacctgaggcatttcatctatcttagctttcctgataaaataaccaaaaggaaatattctattatcattttgtaaggtcgtcagtttcacctcaccactatcaacacacatcgagcgaaatttataacaagtgaatacattaccatgcagaccaactctcctagctttataaaaaactggccccgggctaacaatcttaattacaattattgttattacaaaaattggagaaaaaacaagcaaaaataagactgcaaataatacatcaaatactctctttacaacacgataaaggaacataattaatttatcattctaagtagcacaaattcttcggcagcaaataaacctacacgtaaaccagcagccctatccacttctttcaaatactggacagaacgtggatgaggatactccctaagttctgtcgtatacatactaaatgcttcatactttcttttcatgcacatttctatatctacaaaaacattaggcatgaacattgtttcacttttgtttggagtccattccgttgaagatggaacactataacaataaagttccttaacgacttgtcctaaaacaggacgaacagcaacaagagttgatttatatacattttgatgatcaatatttacatctccccaaaaatgagtaaaaatagtatccggttgaaactcatcaacagaactctctataatcttattaatctcaacgtgtggagtacaatcaagcctcatatctggtaaacctccatacctaatagattttatacccaaaatatcagatgatttcctggtttcttctttcttatgactaataatagccattaaatcctctgaattgcgatactgagaagaactaccatctgtaacaatgagaagttgtacttcacaccctgttgctgttaatttagcaatagttccccccatccctaagacttcatcatcaggatgagctgaaattactaatacttttttcatacctcttaaactatcgaacatcataatttagtaatccaaaatcccaattatttatatcatatatat

SEQ ID NO: 316 - DNA, 5362 bp, Butyricimonas faecihominis
gattatcaatattatctttatcactgaaatttgccggaatatcattcccttccaaaatcattccatccaacacccaaagcgggtctgtactccccgtcaaagaaaccgtactacgaatacgcatcttattcggggctcccggggctccattcgtggggatagatgtcattccggcaacctgtccttctaacaattgatcaatactagcaacaccgatgctctttatatcatccatctttacggtctgaattgccgatgtcgatttacgtttctcgatctgttggtaacccgtcaccaccacctcggtcaactgctcctggtccggttgcaacataaccttaaattccgtggtcttcgtcacgtccagtttcgcatttttataaccgacaaaactaaccaccacatatttcaccgctttcggcactttcaattcaaactttccgtcaaaatcagtaatcgtacccttggggccgagattcttaacctctgccgcatccgggtcaatcattaccgtagctccaatcaaagtctcgttcgtcacggagtccatcacaactcctttgatcgtacgatagtcgctctcgctttgggcaaacagccaaagcggacacaataacgcaatcaataataaacttttcttcatgctaacttatttaatttgtatgttataaggtgtaaaatcatctcatattcaacgcctctttaatccggataatcaaatcctcgtaatgattacgagtttctacattacctgtgtttcgtttattttctgctaattttaaaactttcaataattcgcctctcttcaccgatacagcctcggaaactctacccatagaagagaagtgtaaggtcctcaattgaacctcttctctaggctcaatcgtaaattcgggggctttagaggcaaaacaacacgtgtttgaatgatgcaacgctttcttggtcgttttctccacagccctgttcgagctaacgatgatcgcatcgataaaattcttttgtgtcatccgctcgtagatagataagttacgcccagccttactgctggcaaatatcacgttatgaatatccgcgaacatctcttccggcgtgtaactcttcgcccgacctaaagtcgcttcagaatcaaacatacgcaacaaacgctcgtccttcaacagattatagaatgtagcgtactgtaactcacgtgcaaccgtgtaaggagaatattccacgcccatctggatcgggtaactcttcttccagacctcagcaccgaacaaccattccggaacgataaatacctcttcaatcaagtacttcacgctctctttctgaatctctttcggcaccgggatataccgatcctccggacttcccttcaccgggttattaatataaatacctcccacgttagccgtaacatgcccggcatacatcttccattggtttatcaccgccatcaataattttcctgcctccgcaaaagattctccgtcttcctctgtccaagcgacaatattcggaacaatccgtttcagattcataatcccgtaacgattggctttcacgatgtcatctccaaggtcttcatcctgagaacgaggatcgatcggatctttcgggtcttgttgctcgccataccagtacatcgggtcaccttcatgctcttgaatccattcattcaatatcggcaactcctcttgaggtgtctccgtgtctagccaacgataagcccagttaatcgcgaacttgtcatacgtcccgattttaggagtaatttcctttaccccgtctcccggttgtgccacgtagttaaaacgcgcataatccatgatagaacttgccgttccacccatttttgccgtaaagctcggcgatctcaaagaatccacggggaaagcatgagaagcacccatgttatgcttcaacccgaaagtatgccctacctcgtgagaagaaacaaagcggatagcgctggccatatgctcgtcgctcaatttatttgcacgggctctcggatctatcggtgctgtctgtactcgcatccaagtatgcaataatgacatcacgttatgccaccaaaccacgtcagcctcgataatctctcctgaacggggatcaaccacggacggccccatagcattagcctgctgggatgctgcgtaggtgatgaccgaataacgaatgtcgtctatgtcaaaatcttcatcaccttccggagcatcctttgcgacaacagcatttttaaaacctgccgcctcaaatgcagcctgccaatcccgtactcctgctttaatctcttctctccactgtttcggggtagaaggatctatataaaacacgatcggttttacaggctctacgacctctcctcttttatatttctctatatcttccggttttggttccaatctccaacgatgaacgaattcccgtttttccacttgctgttgctcgtctgtaaaataaatatgctccgtggcaaaaaaacctacacgggggtcggcgaaacgtggcttcataggtaccttaggtaataacaccaaatttgttgtcgtttcaaccgtaagaggtaccgccacgccgccatcaaccacctgcgtcgtcatcaacgcctttaccaccacattcttggggaaaaccttcacgcccaatatcttcgacaagtccttctttaccgaaccgcctaaagaaatctcattatatatatcattaaaacttttctcgctcccatcaaaaatcttgttcaccttgataaccacggaagtcgaatccttcccgtaagcctcgatcgggaaatactcgatcacagactcgcgataattggctttcacagactcactgatcgcatctccctcgggtacacttacctttccattgtaagttgtcacccacaccttgttcatagatttatctttatagaaacgcacgagtttgtcattcgactccattcctctattcaagcctgcatcattcaactcgtaaggaactcccgacactttattaacgattagaagatcacgtcccatcaacgaatcagccacctcgaaatagtaatcattctcaatcgttaaaatctttaccataccttcagtaatcttggcttttttcaccaaatccccgtaagcatccggtttagacacttccgttgtatccttggcatgttttttctttcgtctttccagagaatatcccggttctgacaataatgatagggcaacaagggctatcgcacctaaaatgaatgtttttgttcttaccatacttcttttattcattaaatctatctggttaactgattctttacaataataagacagatttcaatcaataaaaataaaaggggagtgaaaccccgaaaaaaaggagtgaatcatcgtttttttgttataaacgatttttcaaaagaggtagtcgacaaacgtaacatccattttcacaattacatacaaatttctcaccagaataaaagtcataaatggcctgaatgcgttcgaaacccacgcccatggactcctcgctagattctgcacggggctgataattattctccacgattaaatattcatcccgatcataaattttaatatgcaagggattttgcaaagtcacctggttatgttttatagcgttctctactaacatctgtaaactgatcgaaggaacctttgcttccaaacaatccggtctcacatctatggacaaatccaactgatccccaaaacgaatcttctgcaaaaaataatactgccgggtaaactcgatctcttccttcaccgtggacaagctttcgtttcttgtctccagcaaatagcgatacacctttgataacttcaacacgaattccctcgccaaagtcgaatccgaaccaattaacacactcaaggaattcaaggaattaaacaaaaaatgagggttaatctgattttttaattgttgtaaatgtagttccattgactcctgttccaaactacgccgcaaacggtattccttacgccatttatgctgggcaaaaagtaacaaaatcgcgaatataactaccgtaatcaaggcaatcatcgccgtgtaacgatgaaattcatccaatatctcccgatttccatactgcggcacgttaacggcaatcacccacttttcactcccgacaagtaggggatagtaaattcgaagcacctgtgaagataagaaattagaatgaaccataatttccaattcactctgactttttaatacttccttgatagaatccaactcttctttttggaaaggtgaggttcccaataaattttcatcgggatgcgaaagtaatataccccgttcatttacaataaacacgtagcttgacaccttccctgtaacctcagcaaaatatgaatgtaagtctgtcaacgagatatcaaatccaaaaagaatacgtcgggtagctgtaggctcaatagcctcgattgtcgtccagtaagtctttccatcctcgtggtacgtaccactaaaatggtgatccgtatgtgaatccaacaatgtatacatatactttaactcgatcccggaaagtttcatcttacgtaactcggaactattccgttccaataaccgtagagaatcattggtgcccctgaaaaaccaagttctacttaatttcgggtccaattgttgcatcgtcttcaaaagcgaaaataaatcctgctcccggtaagattcacttttccaaaaaaactctctcgccaatcgctgtaattcttcggttttcttaaattcatatgcaacagattctgcccggtatcgacaagcctctcgtgcattcgcattattcatatcgttccccacgtcactaatctttttccctattaaataaatagcggcaatgaataaagctaacaagattaatcctatcgatattatactggtccgaattctcatgtacacaaaggtaatgaaacaattgaaaattgaaaattgaaaatgagacaaaataaaaaaagggcgagtcacttgaactcgccctctcttctaaattcggcatcgacctactctcccacctgtcggcagtaccatcggcgctaacgggcttaacttctctgttcgggatggaaagaggtggatcaccgtcgctatagacaccttttaatgttttccagtcacttcatcgagccctccggccgctcgtgacaatatctttaaagtttcttcatctcatgctttctatcgaccgtcaatcaacatgattgacaatcgcttggaacgttaactgaatcatctcacccaccgaacgtcaactttcgggtgattagtaccactcggctttgccgtcaccggctttacacctgtggcctatcaacgtcgtcgtctacgacgaccctgtaaggagatctcatct

SEQ ID NO: 317 - DNA, 5347 bp, Butyricimonas faecihominis
accttatgatccttaaattgtttgttaaataccaatagattttctgttaataaagttcgattttccaaaaatgatccttgagtggccgtcttaccatccgtggtcaattccataggagtaaacgtattctgtttacttaatgtatatccaatagaattcgttgacgagattcgaagccaatcggcaatattataagttaaagcaacactcaaacgaccaaataaatcttcattcttctccttcactcctttttgatttttcagcacgtattcctcaaccacggaatttgcgggcaaaaatggagacgtttcaaaaggcaccttcggaatatttactaaattttgaccgtctcccatgatcaagttactactctctccttgatttcgtttacgacgggcgtatgccaaagacaaatgaacttctatattaaaacgttcaatgggtttaaatcccaaattcgtcatgaagttaaaccgggtgaacccactatttctcaaaattcccgtttcatcataaaaaccagctcccacgctactattaaaacgatccgttccatacaatgactgcacgttggccgttatgacttttcccgtttggaagaaacgcttgaaccaatttgtcgagttattataaaacgaattcaaactatcctgcaattgatctatatattttgcattatattcactaccatttccccagaaataatcataagctcctccatacttcccgaaaacatcctgataacttttaggatacaccgcctcataatcatcattcatataagcctgacgataattctgcaaggctttcaatttatatctccgagattctttaccggcaaaaactgtcgggtattcagggatataagaccatgaataagacacgttagcccgtatggaacgttccccgtttttaccccgtttcgtggtaaccaagatgactccattagctgcacgtgatccgtacatggaagtagccgccgcatccttcaacacttcaatagattcaatcgattccggatcaatctcggccaaagcatttgtccccgttaaagaagaagtcatattcgtgatgggtacaccatcaatcacccacaggggagaactgaaatcacgttgctccgcactcaaagtattatatccacgcagaatagttgccgttcccccactaccgggcgccccgctcatgttagaaacatctaacccggcaacacgcccctgcaataaactggaaagatttgaagtcggaacgctgataagatcctcgcccttgatcgaagtcatagcacccgtcatttcccgtttcgtggtcttcccgtacgcgataacccttacctcgtccaaatccgacacgtcatcctccaaaacgacatttaccactcccggcttacttaccggcacctctttcattttcattcccacgaatgagtacatcaataccaaatttttctggggagccaaaaccaatttatattctccttttgaatcagtggccacccctttcgtggttccttttatgtacacggatacaccgggtaaagacccatttttcttgtctgttacccgtcctcgaattacccattcttccatcggttttattgtatcacccaccacacgttccctcgccgagatcagaattgtttcctgctcgatggaatacaccaacgaactgcctttcaacaccaagtccaacacctttaccacatccatatccttcacgttcaaagacaagttttttacttgtctcacctcgttctcgttataaaggaaaccgaactttgtctgttgctcgatagcctcgattaccgctttcagattaacgttattcaccttaatcgaaatcttttgagccatggtcacctgattagcatacagagacatagaactcatcaaaaaaataatcagaaaatttcgcataaacaataaccatttttccacacatcctccccgcggaagatagcgcgtttctccattttttttcataactttgtttttgactaaataataattatttattgattattaatgataaccggggatgattggacccattcccggttatttctttttatccacctttactattctattcttcaacattaattccgttccggttgttctttccaacatcttcaatatcacgctcagattctcgaaacgtttcaatttccccgtcacggtgatctctttcaggttctccttcacgaaaacgaaatcgacatcataccaacgaccaatcatggttaacacctgttccaaggactcgtcgttaaaataaaaccatccttcgtgccaagccgtgtagtaactcgtgtttaccacccgtacctcgtgacgcccgtctttcccgatcaccatctgttccgaaggttccagcgtgatctttgttttatgcccttgagaaacctgcactttcccctcaaccaaagtcgtttcataggaatcatccgtgtcatatgcctttatattgaaatgcgttcccagcaccttcacttcaaatccccggtcaacttccacgataaagggacgaaccgaatccttggttacctcaaaataagcctctcccgataaacgtacccgacgtacgttctccccaaaagctaccggataacttaattctgatttcgagttcatccacacccgtgtcccgtcattcaagatcagcatatattcatgcccacgccccacgagcaatttattataaatcaattcctgcacggattccggtctgttgtcctgataattcaagcgagccgaatcgaccattatcttacttccatccttttcgttaatatggttcccggctgtctgtaattcccgcaatgtcccgtcactcgtgacaagcacagcctccaaggtccccggctccacatcgtgcaaactaattacatttttcaaggatgcattatttcttgaatacataacataaatggccgttccccctaaaagaagaggcaataacacggctgctactctccccaacagaactgataatcgccgtctacggggcctcatcacccgttccaactctctatccacatctatatcttctatcatttgccgccgccgcaaataatcctcccccgaagacatttcgtcaagtaataatttttctttagaatcaggcacgacaatctcgtccaattgacgccgttcctgctcggtttccattccaagcaactgggcaaacacgagccataccttatgatttgatttcagattcatacatccgtctattatccttaatacatcccatagacgaactcatgaaaaaaactagtgaatcaaaaacagacttttttcaaaaaaaataacaatgaaaggaaatattgatcatgcaattggtctcttaataccttgtaagcatttgcctttaacgtgtttaccgaattcacggaaatatgcaattgatctgctatctcctgattctttagaccttgtaacttcaacaacaaaatttcccgggtacgttccggcaataattgtatggcctgatccagtaaccggtaaacatcttcacgcaaagtttctatctcgaaaaactcttcacgttctttttcattttcctgttcccactccacgtaacgatgatggatattctcccgacgcaacacgtcaagacaacgattcttcacgctagtataaagatagtttttcacgctggcaacacccaccagttccgatggattttcccataatccacaaaacacatcgtgaaccacgtctcgggccatctctccatcctccaagtaacgattagcaaagacacacatggaggcaaaataatcccgaaaaagaattttaaaatcctcttcttcttgcttacctcttttttttattacatgcggatcgcccatctctcttttttagtagagcaaagataaagcttttaatttataaaactttccgtttaggtacggtagccacgaaatctttcagataaaacggttcaaaataggctacatcttcaaatttaccggcttcaaagtatcgttctgcaagcccaatcatgtttgccgcagaagtcgagaccccgttaataaacacggcattcggatgtttcaagacttccttcaccttatcactcccatttccaaagaacaaaactttccgggtagataataaatcggcaaaagaattttcttcaatcacttcagcgtgaatatctcgcacgacatttccttcccgatcatatattgccgtatagacttccatgcgacgggcatcaatcatcgggcaataaaaagcctcttcgtcctctctttgggccacggcatttgccaatgctgccaatgtactaacagcaatcaaaggtttcccggcaccaaagcatatccccttggctaaagataccccgatacgcaagcccgtgtaggaaccggggcccatactcacggccacggcatacaagtcactagcagtcaagtcgttctcctttaataaatcatccacgtacacgcctaataaagtggaatgattaaatccctcgtcattctcttttaaagcaatcacgtttccatcccgggcaatcgccacggaacatacatctgttgaagtatctatatttaaaataagagccataatacaattgaaaattgaaaattgaaaattgaaaatgtggggacactctcgatttcaatcttcgggttattactttctgatgatttgaatctcgccaccaacacccagtttgatgatactggagggagcgggattcgttgtttcttcctgacggaaatcgaccacgtaatcgacagcagttttcacagcatcactgatttcggcaaaacaccggggagaaggttccccgctgatgttggctgacgtcgagacaatgggtttacggaaacggtaaagcaaggatttcgtgaaatcctccgaggtgatccggatgccgatggttcgatctggggcaatcagattcttcgccaagttctttgcgttcgggtaaatgattgtcatgggtttatcgttcacttcaagcaactcgtaagccacgtccggaacctccacgtaggatgcaagcttacccacatcgtccagtaataccaacatagccttactatcctcccggtgtttcagctcgtacacccgtttcacggcagcctcgttcgtggcatcacacccgatgccccatatcgtgtccgtgggataaagaattatccccccatttttaagaatttcgcaagccttgcgaacttcttcctttagcttttcatcattcattataagtcatctatagtggggacgaaagtacaaagtttacggcaggatgtcaatttttaaggtatctatttttattcttccaaacttttattcaaaatatcaagatcgtatccatatagtta

SEQ ID NO: 318 - DNA, 5337 bp, Butyricimonas faecihominis
ggattaataatgagattgttatgaaaaatttgaaatatatattgattttattgctccttgtcccgttttcatgtattgatgacaagtcgaaatttagtgataccgagatagatgaaatcgagattgcaggtatagagaaaagtcgggaaatagaggtcggttccaagttggaaatttctccggtagtgaccactaaattcggggagaaatcgaaactttcttacgtgtggtataaatacaatcaagagcaacatgtggcagatactttgtcccgtgagaaagatttgagtattgttatcggtgatgtattaccgggtgttgaaaatacattggtctttaaagtgattgacgatcaaacgggtgtttatgcgttgaataaatctactttcactacggtaggtaaatactcgggcggaacgttggctttgtgtaaaacggatggggaaatggatttggctatgttgaagaaagacgggacgacgttgtacgagaatatttatactatggcaaataatggcgaaaagttgggtacagcatctaaacgaattttccaaacggatcttaacccgagaaatccgttggggtataaagccgttattgttacttgtgatgacgagactgggggtgtttatctggatcccactattttcgagagaaaggatgatatgaaaaataagttcgttttcggtgacgagttagaggggaaattggctatcacgggatatgccgaaggacagggaacggattatataacaatgaatggtaaagtgtatgtcagagagtacgggtcttctgaagaaaacgtgagttggaatccggctttagtctttcttgcagacccgacagattatgccatggcagattacacggctcacccgacagatcatccattctacgcctctccgttattctatgataatttaaacgggcggtttgcatttaaccaacaaggtggattttttagttcattggcaggggtagattcggatttctcgaaatttgatcctaataatatgggaaagggggttaaaatgattttgtccgggagcatgaatagcacgcttgatgaggtttgggcattgatgaaagatgaaaataaagatgagtactttgtgatcacgtacaagttcacgtttgttgcatggactagttacacgtttttctctttgtcaaaatcggcactttctaaagcgtcaaatgccgatctttatagtgcatcaatctttatcccggggacgaaaccgaagatcggacacatgaatccgtgggaaatgagcgctaaaggaatttcggatatattcttttttgtaagcaataataaagtaatggcttttaacgtgaagactttgtccggaggtgtattgattgatggagatacggaggggtacacggtgacaagcgtcgattgtacagaagtggctgccccgacagagactgatccgaaagcatcgttcgtgcaattgactgtgggggttaaagataaaaagttgtcgtctaaatcgggagggattgccgtgtatcgtttaaacagtattggtggaatttcggctcaaaaaatgtatgccaagactggtttctgcgatgaggtgattgccacggtggaaaaaacgaattgaaaaaggattaataatttgatttatgaagacaagtgtaaaaagttttgtcgttttaatatcttgtgggttatttgcttgtcaaccgggcaagcaaataatccaaggggaaacgggtgatttgaatacaaataaaatgtatttatgcgaggtcgtgagtgattattggaaatcccatagagccgtggactcggcagacgtgatagacggaaaattcatgtttgaattggaaaatgtgcagccggaactttattttttgggagattctccgaatcatggagggtatttttttctggatgggaagaggataaaagtgcaaccggaaaacgtgacagaagaagaaattttttggaaagtcgagggggcttttttggatcaaaaatatcgtgcctttatggagcaatgggatgaggcgacttttaagcagataaccgattctttggacgcactcttttttcaggctcgtgatgcggggaaccgggaagaaatggctagaataaaagaggaatctatgcattattacgatgaagggaggataaggagtgatgctttagtgaaagaggttttgaaaaagaataaagagaattcttttggaatgtatttgtattattacaagcaatttcaacataaagattttccaacgctggaagagattacagcggaaaaggcttatgttgagagttttggggcggccgcgaagaatacccgttatcttccttgggtaatggagaaattaggtaaatatgagggatgtgcgataggtcacgaggctcccgaaattgtagggaaggacacgttaggaaatgaattgaagttaagtgatctgcgtgggaattacgtgctggttgatttttggaactcgtattgtcactggtgtcgggaggaaacaccggcattgaaacgggccttggagcattttgccgggaagaatttcaaaatactaggtgtgtcttctgatcgggtgaagaaactttggatggatgcgattcacgaggatggcagttattgggatcatctgatgttggagaaaggggatgacgtgatggatcgctattgcatcaaggggattccccatatcatactggtcgggccggacgggaagattctggccaaggagttgagggggcaggatttgatagacgtgccggatcaatttgtgaagtaaacgaattaacccgaattcaatcgtgaatatctcgtgaaagtcccgtgaaaggacgatacagacgagatatagccgagataaagacgacttaaagccgagtggagtcgtctttatctcttttttttaacacttgtacgtgtcggataagtctttaactgggttttatttctactttatttgggttataaaaaactgataagtagcatgacgttcagtagggtgacaattcccccgatcacgtacaggagccatttcgtgtaagtagagtttttgtatttccccatgactttggacgaggaagtgaggtaaacttgcgtgaaaatggtgatcggtaactgcacgcttagagccatctgcgagtaaatcaacccttggaaaggattcgatactaccatgatcagggcaaaagcgaggatgagagaagttagcacaccgaggcgggaatgactgtccttgatgtcgtaaggctccttgtatattccggcgaaaatggagccggcagccattcctgaggtaatagtagaggaaattccggcaaacaggagagccacggcaaagatcacggaggcattattcccaagcaatggtgccagcagggaattggcttgttccagttccgtgacgggagttccggttctgaaaaatgcggcagcggccagtaggatcatggcgctgttgatggcccaaccgatcaccatggagaggatcgtgtcggcatattcgtagcgtaattgttttttgatgattttatcatcctgtatattccattgacggctttggatcacttccgagtgaaggaatagattgtggggcatgaccacggccccgagtacgctcatgataacgaccatggaaccttcgggaaaagcgggggtaacccatgcgggcaaggctgtgttccagtcgatctccacgagggagagttcgtagatgaacgataagccgatgatggaaacaaaagcaatgatccatttctcgatcacccggtaggtattcgtgaacaacatgataaccacgaaaatcaatatgagtattgatcctgtccggatcgggatgttgaataacatttgcagggcaatggctccacctagtatttcggccaaagatgtggagatggaggcgagcatggccgaataaagaatacctttggcataacggggtttcaagtattcactggcggcttccgaaaggcacaagccggaggcaatccccaagtgggccacgttgtgttgcaacacgattagcatgatcgtggacagggtgaccatccataatagggaataaccgaattcggctccggcagctaggttggaggcccagtttcccggatcgataaagcccacggtgacaagtaggccgggacctatatatttaaatatttccagtcctccgagtttcgggttatgttttgccgtgttcagtagttctttgaattgttttaacatgttgttcgagttaaaagctaaaggttaaaagccgatcgtgtaattttattattatttttggaacttcaaaagtacgaataacgatgaatatttgttctcgtgatcgtgaacttttagtattaacttttaacttttgattttcatgttgattcctgtacttcttgtcgtggcctctttggtggtactttatttcggggcagattttctggtgaaaggtagttcatcgctggccgtgcgttttggaatatctcctttagtagtcggtttgaccgtggtggcattcgggacgagtgcgccggagttactggttagcgtgcagtcggcattggaaggtaatccgggaattgccgtgggaaacgtgatgggatctaatatatttaatgtttgtgctatccttggaatttcagcgatgatttacccgttgagggtgaatccccggttgattcggctggatgcacccgtgatgctggcggccacgttattgttcgtggggatatttcataacgggagtttcggaagatgggccgggatattgttttttgccgggatatgtgcctatatgatttactgcgtgtacaaggccaagcggggagaggtggttgaaggggacgaggaaatcaaacccacgaagagctggatgctggatgtcgtgttggtgatcgcgggacttgctttgttggtatggggatcgggcttgctcgtcgataatgccgtgattattgcgaaagccttggaatggagcgaggcggtgatcggtttgacgatcgtggcagcagggacaagtatgccggaactggcaacttccgtggtggctgccttgaaaaaacgtacggatattgccatcggtaacgtgatcggttcgaatatattcaatcttttggctgttttaggattaacagcgacgattgcgcccgtggagaccaaccagattaactggacggatatgctggtgatgctcggaacttctttacttctgttgcctttcatgcgaacgggattcaagatcgggcggggggaaggtggcgtgctgttagttatttatattgcttatacattgtatctgattgtttgataaaaattggtgggtgggattggtgtgataatataataaaac

SEQ ID NO: 319 - DNA, 5321 bp, Butyricimonas faecihominis
gaatatttcgtatttatggaatacgataatattcattacaaatgataataatttctttttattgaaagaaatgtcacggggaattaccgggaaaagtaacttcccggtaattctcggagattgtatcgtgaggccatgacttctccgtatgcaccacaggagtgaatggcgatcaagtctcctcggttggtgaggggtagttcccggtctttgccgaaacaatcagatgattcacagatagggccaaccacgtcgtatttttcatgttctcccacggaggtcaagttttctatccggtggaaagcttggtagagtgccggacgtaaaaggtcgttcattcccgcatccaagatgacgaactttttatgtttcccttccttcacgtacaggacacgagagataagggaaccgcattgtccgacaagggatcggcctagttcgaaatgaagttgctgacccggctgggcctcgaagaaatcagcaaaaatttgaaaataagaggcaaagtcgggaatcagaccacacgtggggcaatcgtaattgatgcctaatccaccgccgaagttcacgtgagggagaatgattccctgttctttcaggcgggattgtatttcgtttactctcaaacaaagtcctcggaataccgtgagatcggtgatctgggagccgatatgaaaatgtagtccgataagcttgatgtgttccatttcccggcaggccgtgatggcgtggtcgaggtcgtaaaggtagaacccgaacttgttttcttcgattcccgtggtgatgtaatgatgcgtgtgggcatccacgttggggtttacccgaagagcaacagaggcttttttccccatttctccggccagcatgttgatcacctctatttcgggtaaagattcgcagttgaaacaaaatatctctttttcaagagccagccggatttcctcgtcgcttttcccgactccggcatacacgatctgttccgagggaaaaccacttgctacggcttgagccacctcgttaccactcacgcagtccgcaccaattccgtggctttgaatgatgtcaagaatgtgtgggttggcattcgcttttatcgcgtaatgcaaattgaatccatgttcgttagctgcttgggaggcggcttgaagcgtggcttgtagaagagtcgtgtcgtagtagtaaaacggggtcttcaaggtttgaaatgttttgatggtttctatattcatgtgggtcggtttatgaactcatttatttaataatctttcgctaagagcctcaagtgctttttgcttgtctgcttgtttcacgagtagagaaatactgtgttcgctggccccgtaggagatcatgtgcaggggaatatcttccagtgcggtgagagcccgagccgcgagtccgctattattgatcgagcaatccccgacgatgcagatgatggaaagagattcttcgacctcgattgtgccgtatttcgtgaggtcttttttgatgtcttccaagtggcatgtactgtcgatcgtgagagatatggcaacttccgacgtggcaatcatgtcgatcggggttttccatgattcgaatatttcgaatactttccgtacaaaaccgtaagcgagcagcatgttgctggatttgacttttatggccgtgatcccgtcttttgccgccacggctttgaaatctttgatcgggctttctttcgtgatcagggttccttcgtcacttgggttcatcgtgtttttcatgcggacggggatattggcttttttagcgggctgaatacttgacgggtggagaatctttgccccgaaataggcaagttcggctgcttcatcaaaagatagagaacgaatggctttcgtatttttcacgtaccgcgggtcgctgttatgtacgccgtcaatgtcggtccatatctgaatttcatccactttgagcgcggccccgattagtgcggccgagtaatcactcccccctcttttcaggttgtctatttccccgtaagcgtttcggcagatgaatccttgggtgatgataatacgttccgtggccgggttggataatagtcgttttaagttttgctcgatataaaaatagtccggttcacagtctttgtcgatacgcatgaaatccaaagcggacaggagcgtggaaggtataccttgttcttgtaaataatagtgcattagtgtggtggaaatgatctctccttgtgcaacaacggctttttcctgtaacgggtaaaagtccttgttgatgaatgagcggagataggtgaagatggtttgtacaaattcttgtccccggtgcttgaattcttcggtactgtaaaggtcgctaatggtcattaggtaatccagttcgagattttggattgtcgtcaaagcttcctgcctatcattgcggtacagatagttagttatgtctactaacgtgttggtcgttccggacatggccgaaagaacgacaattttgggttggtcatccgagattaattttgccacttcttgaattcgttgcgcggagccaaccgaggttcctccaaattttaatacgttcataaatttattgtttttaaatcatttatttctttacatgaaaaaagcccgtgtattcacacaggcttttttcgacagttttttgacaacagtgcgttagcctgcaaaaagcctttgcatgcacatcatctgtttatagttattagtataccttgttttcattcttcttttgggtttttcacgatgcaaatattgcatattgaaattgaaaaagcaagcctttgttaaaatattaacagatatgtggctacgccacgttacaagttacaggttggcaagtttcaagttcttttttaacaacctgcgctgacctgtaactttccgcaaaagttatcttttgtggaaaatgacggcagtccagttgtcttttactttgttggattgataggttagttgcaaaagttcggctttctcgcgaataacgggaatatcttcggtgtaaaatccgctcatgatgaggtagccgttgtcattaagcacgttcacgtatgcgggcatatcattcaataatatattccggttgatattggccaagatgatgtcatagtgttctgccccgtctagtaaagttgcatccccgataagaacacgtatattgttcatgttgttggtggcaatgttttccatggcgttgttgtaagcccattcgtcaatgtcgatgccggtaaccgattgggctccagcttgtacggccatgatagatagaattccagtaccacatcccatgtcaaggacttttttgccggagaaattaggtttcatgtctaagatcgtttccagcatgagagcagtcgtggcatgatgacccgtgccaaaactcattttcgggtcaatgatgatttcgtgttcgatgtttttaatcgtgggatggaatccggctcttaccagaatccggtcttgcacgaggataggcgtgaagttttcttcccaaattttattccagtcttggttctcgatttctgctttttcccaggtgattgtgtatagggactggaagaaagaaaggatttctaatgactttacttgttcttcgttgaagtttttgcttggtatgtaagctttgaaaccgtcatccgagtatgaaaaactgtcgtatccgaggtcgccgagttcggcaataatcgcatctgcaatgtcctccacgtaaggggagatatggaaagtgagttctgtataaaacatgctatctgatttttttgcaaatgtagcaaaaaatcagatagctatgctcttcacatgattttctctagtttatcgagagattgagctatttcttgatcagaaagctcgaagttctggagatttcccccaaggtattgttcgtaggcgtagagatcaatcataccatgtccggatagattgaacaggatagttttggcttttccttcggctttggcaattttcgcctcccgaatcgcttgtgctatggcatgagtggattcaggtgcaggaattatcccttcggtcttggcaaataatattccggcctcgaaggtctccagttgcggaatggcaacggcctccatcagtttgtccttgagtaattgactgacgataaccccggctccgtgatagcgtaagcctccggcatggatacttgcgggttgaaaatcatgtcccagcgtgtacatgggaagtaagggggttaacccgacggtatcaccgaaatcgtattggaactgaccacgggttaattttggacaggattgtggttctacggcaattacccgggtatgttttccttccttcaagttcctgcggatgaatggaaaactgattccggcgaagtttgaacctcccccgaaacacccgatcacgatgtctggttcatctcccgctttttccatctggagaagtgcttcctcgccgatgatagtttgatgtaataatacgtgatttagcacgctccccagggagtaattggttaggggatcttgtgcggcaagctcgacagcttctgaaatggcaatacctaggctaccggccgaatccggatattctcgtaggatttttcttccggcttctgtcaagttactcggtgacggtatcacgtctgatccccacgtgttcatcatcaacttacgatagggtttctggttgtagcttacttttaccatgaacactttcaggtccagaccgaaatgttggcaggcaaagcttaatgctgtaccccattgccccccgccggtttctgtggtgatgcgtttgatgccttgtttgtaattgtaataggcttgtgcgatggccgtgtttggtttgtgagagccggcggggcttgttccttcgtttttgaaatatatttttgcgggagtgtccaaggctttttctaaagcataggctcgtacgagaggggtcgatctccatattttgtacaagtcttggacttcatcggggatctcgatgtagcgttcggtagcgaactcctgctttgccaattcttgggcaaatagcgggtaaaggtcttccggttttaacggttgttttgttcccggatgaagagggggaaggggtttgttgggcatgtcggccacgatgttataccattggattggcatttcttgctcggtgagcataaattttttgattggtttcatgatttttgatttaaaaaaggtgaataaaaaagagagcctactgtttgtaaacaataggctctctctatatctaattatgcaatacaatcacataacctcattgtttactatgaagtttaaagaggtgccaccaccaagtttgggctatgtgttgattgtatatcat

SEQ ID NO: 320 - DNA, 5321 bp, Butyricimonas faecihominis
attatgtattacgatttaaaattttatattcactcccgccatcaccgtcgccttaggcatcgggaatccggcgttgatctcgtacctttgagcgagtagattctctcccttcacccaaacatcaaacccatccagtacacggaaagacccacgtacattccataacaggaaatcctcggtttcctccggatcaagttctttatacaacccggccacgtattgcaatccggttgacacattccaacgtccctttgaaaaagccgttcctacataaagtttatgctccggagaggctaacacgggattatccatgtgcaaataactataattcgcatccacggaccaagcgggaacaatccggtaagccacctgagcctccacaccggcattctcaatctttcccgtgttcacgttcaagggacgcccgtctatcggcatacgcataatcaggttctccccatcaatatagaaaacattcacaccgtatgacaatcgcccatccagcaaccgctgtgcaaatgaaagttcgtaactccataacctctccggtttcagatccgggttagccggacggaacatatacatttcacgaatcgtcgggtaacggaatcccttgcttgccatcaacttcacctcgctgttttccggcaaatggaaagaaaacccgacctgcggaacccactctgtccccacttgcgaatgatggtcgacacggagtcccacgtcaaaagtaagccaatctcccaaattctgccggaaatcaatatatcctgccacgtcatcctgtgttttatccgcttgggtatctcgttctcccgctaatgtcttgttccaagcctctcccccgaaatggaaataatcaaatcccacggtcaggcgattcccctcgaaaagctgtacactctggtaccaagagacacccaacatctggtcccgtgaatgaaaccgataatcaagaggatcaccccctaaatgataaccatcattaatccaatgtttcccccagttataaaagaaactcaacgttcccgacgttttcgcataatgattagccaaggcaaaagacgtcattcctcgtgtaattcgctggtcgttatcaagtaatggattggaaatttctcccggattcgaagcatcaaaatgagtcagattcacatcggcccaaacattccacgcatccgaaatctcgtacccgaatttggcataaccgccatattgctcgaactccatatctttccggtggccgtccgtacgattataggaaccactgacaatacttgtgaaccgccccttccgaatacgattggtaacctccgattgcaacgtgttatacgaaccgtacctcacgtttgcatgtgtccggattccatcctgttgcatcttcctggttacaatattgatcactccccccatcgcattcgacccgtataacacagacgccggaccccgcagcacttctacacgttccgccagcaaagactggtaagcatcggaaatcgggtgtcccatcagtcccatgtattgcgggtgtccgtcaattaacacgagcatccctgttgtcggtaatccctcctgtggcacacccccgattccccgtaaactcattcccccggcagcccctccggataccccatatcccatcagccctctggaagtcgtgaaaagtcccggtatatactcggtcaaaagaggcaataacgagggatcgttacgatgttcgatctgttcccggttcaccacggaaaccgtcatcggcaaatgccgcacgtccgtctcgtttcgtgttccggtaacaacaacctcttctatggtcacttttttctgcaccgataagctatcaggcacttcctcagcccgcaaggaaacgagcccacccaaaaatagcacggtaaatagtatctttttcatcctgcattattttgtcacgttattcatcgtatgtataaatccctctatctgttgcagacactcttctgccgtgtgcatccggaaacagcgagtctccaacggacaccagcctgttcgggtacgattaatgatatgaggcacctccgacaagcaatccaccttaatcccggaccgttccaaaagctctctggccgggctactgataacccgagcaaacacctcatccacgccccccaaagccatcaaggcggcagcagccttgccaatcactttatccgcgataaacgcaccccgaagaaaatccggttccgtcttcaacaaccggtataaatcctgtacaccccgctcccagaacaaccgggtctctcccccgttataaatcacgcaggaacattgttctgcatccaagcgctcaatcaacacctttcgatccgtttcaaccatcatgctcatttcctcaacttaaaatacccgttcctgtttcaaatcctccacgaaatgatcaattcgttgcatctctttcgggatgttaattccctgcggacaatgatgtacgcactggtcacaaccgatgcaatgactggcttgtcgcaaccggggaaccgaacggtcatacccgataaggaatgcccgccgggccttacggtaattctcatcctgtgacgaggcaggcacgttaccctcgttaatacacttgttatagtgcagtaacacagccggaatatccaaaccataaagacaaggcatacaatatttacaatcattacaaggaatggtcgggtatcgcaacatcagttgtgccgtttcctccaaaaataccttatcatcatctgtcaacggatccagcggtgagaatgtacgcaagttatcctccaaatgctccatgtaagtcatcccgctcaaaacagtcaataccccgggaaacgaacccgcaaaacggaacgcccacgaggccacgctagattcgggcttacgcaatttcaacgtgttcgccacatgagtcggcacattcgaaagacggccacctaacaggggttccatgataatagccggaatgttcaacttttgtaattccccgtaaaggtactcggcatctgtattccgggtattcacctccttcgcgtgtttccagtccacgtaattcaactggatctgcacgaaatcccattttacccgatcatgtatcgagagcaagtaatcaaaaacttttatatccccgtggtaagagaatcccaagttacgaatccgccctgcctcacgctcttcaagcaggaaatccaacacaccgttattcacgtaacgctcctcgtactccttcattccgttccccatcccgaccccgtgaagtaacaaatagtcgatgtaatccacctgcaattctttaaacgaattgcggtacatcgcgatagaagcctcacgactccaagtcgaaggagcgaaattagacaacttagtagcaataaaatacgtgttgcgcggataacgtttaagggcaatacccgtggcacgctcggaacgccccatacaataagcgggagacgtgtcgaaataattaacaccatgtgcgatagccgtatccaccaaccgattaatcgtctcctgatccaaatctgcatcaggattccgtcctgccccaccactcgtatccggccagcgcatacaaccatatcccagcaaggagactttatcgcccgtccttggatgcgtccggtaagtcatttgatctgtcgggatttccccttgtgccgaacgattacccgacacgatattatttctcgaattacaacccgccaaaccgatcgtcgatgcagccgcaccaacccctaatcgctttaaaaattcccggcggtttatctcttctttcctatctttcttttccatgtactcgtaatttttagatcgttctgtgctgttcatgtccttccacgtaaatggcactgaatggacgtgccggacaaagattctcgcaagccccgcaaccgatacaacgttccacattcacaaccggaatcttcaaagaatccgcatcatctgcatcggaaggaaccatcgtaatcgctcccgtcggacaatgccgggcacagttgccacacgccaccttatcccgaagtggtacgcaattcttctctacccacacggcatgaccaatctgtgtggccgacttatccgccggggtaagtttcaagattgctcctgccggacatacctccgaacatttcgtacattccggtcggcaataccctctctcgtatgacatctccggttgcataagcgtttccaacttggtagagggacgtaacacctgattcggacataccgaaacacaaagctgacaaccggtacaatgtgtccgcatattacgtagccctttggctcccggtggaacaagcggtgtcatccgggcagggactttcttatcgagaataacagccaaaccgccatccacctttttctcctgcgccttgacagccgaagaaacaagaaccagtcccatcccggtcaagaaactacgacgagcattatttgtatttcccgtttcggaagtttcttttatctcttttttcccaaaccgatatttataactgatcgcaccatgcttacaggaatcaatacaatccatacaagtcacacaacgactataatcaatccgatgatccttgtaattaatgcaagccgccttgcatttacgggaacataaactacaatttgtacatttctccgcatcaatctccggacgaaacaaggaataccgggagaagaatcccaacaccgtacctatcggacagatcgtgttgcaataggttcgaccatttcgccatgccagtacgactaacacgacaaacgtgcccgccgcaataataaacgtcggcaaactcttcagccataccgaggtctcgtaaaaagcgtagctatcactcctttcggcaaaataagccaacacgttatttccccactggtacacgggagcgaaaagattcgaaacgattcgcccgtaagaactatacggagccaacaatgccaccaccgaaccaattccggcaatcatggcaataataaacactcccaacaccccgtaccgtaaccacgaaaccgcaggagaatacgaaaaacgatatttctttttctttcgccgtccgctaaaccaagacactacatcctgaaacacacccaacggacaaatcaccgaacaatacacccgtccgaacacgagcgtcaataccacccataaaagaatgaccccgacattcaaggccagcacggccggcaggaactgtatcttcgccagccatccgaaccacccgtgtaatgttcccgtgaaatcgagaaacaacaaggtgatcaagataaaaaacacaagggctactattaatctgattctgcgtagcataagctgttattttagttattaaaac

SEQ ID NO: 321 - DNA, 5316 bp, Butyricimonas faecihominis
aataaatcagcttttatgaaaaaatactttctccgttttatttataaaatttgcttatatttgcacgaaacgtgcgtactatgagaaattacaaccagtgtgaatccggtcttatctacaatgaattttccgtcattctgatacagacctttacttctgccggaattgaaattcccttaaaccccgaaacgaatttcttcatcaagaaggatgatgacgggcattttgacaaccagttgtttacccattcggataaagtcatcaaccgttatcgcttgaaagggttcgatatatgtattgacattgacgggaacactcccgctagactgtggggacacgtacacgtgcgggctgccgtatttttcaacaagacagttgaaatctcctaccggattatcgtgagcccgacgggaagaattaacgggaccaaattttgccaaacagatgttccattcaacacagatcaactgattgccgtagcggggatcgtgcaacatgtggaacattgggtttacaacaacaagaagaaaggccaagaaatcgacggttccctgaaagtcgtttcaatcagtgacctgcacatcgacgaagaatcacacgtccacacgacaaccgtgaaaacgaaaggcgttactttcgatgaagtacaaaaacgctaccgctatttttttgacaggcaaagacaaaacgattcaagaaaaagtaaagaatcccaagagttcgaatacggatggcataattatatctttctggatatttgggaaagtatcggtcacgagggacgaatccgttttgaccagatgcgggaagaccaagttatcgaacatatcgaacaatgtcacaaggcggaactcgtgggcctcatgagtctttaccccgaagagtggccctaccgcatggattccagttttgaagatatttgtgggaaaaacatcgccattgacaccgatgatcttgtgctggcaaatgaaaacatgagtctcgttatcggtacgtacggaaaccgtgggaaagaggctcccaccgactggaaaaaacacttggcccgacgagaccgttatcacgtcagttggccggaatatcttgtgctagtcgaaatcctgttggctaaaaaacacacgatcaactacgtgctgaataaatatatcttcaattcccgacaagcgatcaaggataacagtcacccggaatcaaaggacggccaacagggattcacaatcatcaatgacaagattctagacatgatcgagcaaaatgcccgcctaagtatcagcttatccgatgtaatactgcaactcgattcggtacgctacctgcgctatatgtctcacaagcatatgtatcacgagacaagccgaagactacgaattgacgctgacgagcagcaattaaaggacatcacggaaagagtggataaatccctaacaaatgccaacaatatagccgatctgaaagaggctaacagcacgaagaatattcttcttttcatttccatagcctcccttttcggggtattattggaaggtaacggtgaggctcccgtgttctcgatgatttccaaggaatttggggtattcacggctgtcgttctggttgttatcacttctattggtatatatttcagcatgaaaatcatgatccgggtaattattcattatctccggaaaaagcatagtaaaatgaaatcacatcaaatttaattcacgtatatgatacagacatattctatcgattacaggacgcaactttgcgaatttttctctcgcattatcgaatcacacaaagcctacatttcccacggggaactacaaatgggaatcgctctcgagagtaacgagcttgctcctaattacaaggaaatgtggctaaattatctcgatcgacaagtagaaaacccggacaacacgctcctgctttatctggaaaacggaacaattatcgggttcgttttgttcggtatcacgaatgacggagccagaccttacggggttatctttgacctcagtgtcgatcccgcataccggggaaagcgtatcggacaggaactcctgcaaagagcgacggaaagtttccgggacaaaggaatacaggattgttacctcgaatcgggcgtcaacaaccattctgcccatcaattcttcgagcatcacggctttaaacaagtatccgatattttccggttaaaattgtagaaaacgaaactaacagattaattttttcaaagggattccggttgtgttgattgtttcaagattattgattgccaattgacaccacgtttcccatttttccccgatattgaattgacatttccaatactcctgcaattcagcatcatcaacctgctgaataaattcttttattgcagataattcccggtaaagtttcccaatcacttttgacacaccagaataactctctccgtttttcgtaatacactccttccctcctgccgagaaaatatctcttagattcggacaaacaactccttcttgagttgcaagccaaacagccatccgattgaatttatccgaacgattacttaataactctgggaaaaagataaatcctttaatttggtatctctgtttctcttgcggagatagcgaactccacatacgaatcacaaggttagataccttagaatgatcattatccaaccaccataattcttcaccttctttaagccgggaacgatagtaatcaagaatggttcgaattggattcggttgacaacgcaattcatcataaggaattcccaacttgtcaaaaattgtttctccttttgataaattcatatctaccaaataacgaggagagtgagttaccacaacttccgataaacactcttcgtaaggcttgcaaacaaaacaaaccggttcacacatttttccaaacaaaaggtatactcgctccacatcttccactcgagtcccctcagcaacactacttcccgtagacttccaatgattagctttcgttgttttcacctcaaccccataataaccaccgataacaatatcaggaaaacgttgcccggaatatttcacgatctgatcttcaaaacatgtcccgacagcacattgttgcaatacctccacgactttgtcttctaatttactacctaataaaccagtatacattttcggaaacgtcaatgcttcccgattcatgaagtctattacttttgctaatagctcttcgaaagcacgatcatcttgcatatgaaaactaaataatgacttcatcaggttcgaaataaagatcccacaaattctcaattcgttttcctatatggtaagccaataaaggcggaacggcatttccaataatcttataggctgccgaaggacttagaatatatctctgtttgttttcctcatgaggaatcacaaattcataatcaagagggaaagtctgtatcaacgcacattctcgcggggttaaacgacgctctttcaatccctttttcaattccttgtcaatgataccgccatgttcttttgacagtcgtcgatattcaatgttaccatgatgttctgcccgaatcgtcggcccgatcccgttaacatccacctctgtctgaccttgacaatgagtacccataaacttggctttggaatagaccttttgtgcaggatcatcactatcttccggttccttcagtccggcaaacatccctcccaccgtctgggggggcattaatcccttattcttaatatgatatgcatgactgggtgacggataaggcacgtattcatcggggataacatcacgcatcaaagcctcacgggccgcgggtgttaacgcagatttacgtataccgataaaaatcaccctctcacgggattggggaacaccgtaatctgcggcgtgcagaacacgaggttccagcacgatatacccgtctccatctgcccgggaaaaatcctgttgaataatctccttcacattggaaagatttaccaatcctttcacgttctccgcgataaacagcttgggtttcgtgatttcaataacctctttcatccacatatataacttaccacgggtttcttccgaggcaatctccccatcaataatttttcccttatgatctttatgagaattgaaaccgttacgtttccccgccacactgaaatcctgacacgggaaacctcctgtaaccacgtctactttttccgggaaaaccagttcccctgccttgtgccgtttcacgagatccacgatactttcctcccggtaaacatccggcgtgtaaccgtacttggcgaaataatgggtccaagccgtccgggcctctttcaaaatatcattggcgaaaacaagttggaaacgagtagaatgtaattttaccaattcacctcgctcctgcttttcaataaaatcaggattacttttctcgttaatacatcccttatggatagagaatcctccttccaatcctaaatccattccaccacaacctgaaaataaagataatacccgaatcgttttagatgccatttacttgtacgtttttacacctacaaaaataacaatatttatcgggttattgacactgctcggaaaatttatccgccatttattccttcctcggttaatcaaccatttaaccaattcccccaagttttacatccccgggttcacaacgttaattccgttacaatcccaccactttcattcccgtgaatgcctcgctcgcagcatgatcaaagaaattgattaactccgcaaaacttatccacgtgtaaacaacaatactcgtgatgacgaccagtagtagaactacgattaccatttgattccatttagttttcatctcttttcattttaaaagttactaactcaaatcaaactctcgctcctatcattgctctctgtaaatatataacattattttatatttaccaaacattttcttaataaaatcacaaatttaacaccatgtaaaatatattccgaaacgccactcacaagtccagttcccgacgacaatgaatcagccgatcacgcaaatatttgatacttttgttcttttgaaccttcactgtgttcacactaatgcccaatttatcggcaatttccttcccggagaaaccactgatacttaatttcatgatctgccgtctcactcgcggtaaatcaccaatatgaagatgtagcaaacgtacgatctcttcctgcacggtgtccagcatgaaatctttcgagaaatcctcgttttctttctcttggtctattttatcaagaatcatcgctctttttctcttgttacggatatatagtaaagaattattatacaaagatttatac

SEQ ID NO: 322 - DNA, 5296 bp, Butyricimonas faecihominis
ttcattaagtgctatctaccagataattattttttaattaacctgtttctaaaaatcacgcatgaaaaattacacgattggcttttatctcgaaaagttatactattctcctcaatttgaacccgttattaaagaaatcatcaaacgcaatatatcgtacgtggtaattattccaaaaaaccgggaacgggatgagttaaatcaacgtggagaatccattaaacactgccaagaagaaggtttcacatattgtttcgaagaagacgactgtgaatgtaatatcatgatttttggaaacacgccacgccctattcataccccgttcaagaaatcagctcttatcatgcatggagtatggggagggaaaatggttaattatgcatcgggcctgaatgatgtagatctacgctttttagatggagaattcctagaaaacagtttaactaaactctttcctgaaaagaaatccatctattatgtatccggatattcaaaactggatagttatttcgaattcacagaagaagaccgggtgaaatttcttcagcattgtaatttagatataaacaagaaaacgatattgtatgcgccaactttctatccatcatctattctgaaaatgagtaagaaattcccggaagatcttgccgattacaatattatcctaaaaccacactcgcacctgttcttacggaaaaaatacacgaaagacctgcacagactggaatcgtggacgaaatacccgaacgtttatctagctaaattcaacgaaaccaacattctccctttccttcatgcctccgatctgatgatctcggatatgtcaagtgccgtatttgaattttcgggagtcggtaagccggcaattatcaatatgtttctaagataccgtttacttcatcgtatattccctcataaaataaccaaacgattagatacagccaacttttttctctgggaagtaggagacaccccgagaaactatgccgaaatgttacaaaatgccaaggaaaaccttactaatccggataaaaacaaagaaaaacgagaaaaactcagccgccatatagtgggtattgttgacggcaaagtgtccgaaagaattgtagataaactactggagcttaacagtaatatctaagcataatactagtcaaactttcgtcagtatcgtgtacctattacgaatcgttttagcccggtttataatctgctcgatctccccgttcgagaaagttatatcccgttctatttcgtccaatattttcatgcgttcgaaaaagatcatcaacttctcgtaatcattttccggcttacggaaatcccgttccactaacaaatgtccccaagccacttgcaaaccgtgtaaagttgagcgattgggaaacaaatcatcaatggcatgactaatcaaatgttccgcaccactggccggtcgtgagctattggcaagcaccatggccaaccccgaaatcactaacccgttcgcaaggtcaccaatgaaacgagaagaccgaatatcattaaaggtgtacgggatcacggaattaccactcaatgaagccaaagccatggcaaaattattaatactttctcctttgtcaatatgtgccagattccaatctttcaccgcactagcattggacacgagatcccctactcctgccaagagtaatttctcgggagaaccttttataatattcacatccgcaataatacccaaaggagccttcacgccaaagctctgttttttaccatctttcaatagacgggcaataggggaataaattgcatcattagataacgttgaaggcactgttatataagttaagtccaaggtatttgccattaacttaacagcatcaataatactacctcctccaaaagcaactaaaaggacttccttattcgtgatcgtattcatggcctccagagcctcatcgtaagaacctcctttgataaggagtatatcctcgaaagacaatttatccaatcttgatttgtacaaattcctcaattccaaagaagtaaccaatattttctcattgaaatatagatggttttccttcaatatatcatccagatgaacaaaaatatcctccccgagttctaaaacgataggaacattgatcgtcttgtaatacattattttgatgcttttattttttcgactagttcagacgtgctgattcccttcgtgtaaggtaagtaaaccatagaaacatggtgttcttccaaaaattccggagtgacacgaatctgtttcaagtacccttctccatcccaatcatcaccatgcacgatgatgtcgatatcatattttttaatgtattccttattatcatactcgtgaataataaaagcatcatctacgtaacgacaagctttcacgacttccagacgatcctgttcagacaaaaacggtcggcgtttatacgaggccaccatttcatccccgttaattgccacgattaaacgatcacctaattctttggcacgtcgcaataattcgacgtgtccaaaatggaaaaggtcaaaaacccctataacatatacatttttcatactacctaatttacttgatcacatccggcctccctatattctcttaccacaaccggaatcacgatgccaaaggtagtaaatatagtttaaagttcagagtttaagtatcaaagtttagcttttcgaataaaagcctcatccatcataggttgcagacgttcccacacgtattccacggaaagtaaatcgaacaactccttttctgttctcccctcgattacctgcccgggaaacatatcaaaaggactcacgctctgataacgcggatcattggacggcagccatctaggcagttcaacccaaggcgggtaaatagccagccccggcaagtgacacgcctgtgcgatatgccgggggccaccttcatttccaaaaaagaaatcggctgtttccagcatggataccaatttccgtaacgaatcggcctctatatcaataaaaatatgctcgtctttccccatatcttcgtacaatgccaaggccgcagccttttcttcccgggaataattaaaaatcaactgggcatcataacgctgaatgatacgaaacaatatctccttcatcttcgccatatcccaagccttcctcgccactctggtaaaaggagtacataccacgataaagcgggaaaaattaattccctcctgttccatgtatttcctgaattcagccgtttcctgttctgtcacgtacaaccgaaaatcagtggtcattaccaacttcccttctcgctccaagggctgtaacaataacagatttctcacgacttcatccaagtcgtcattcacgtgattacgcacccggtaattatgaaaaaaatgattataaaatttagatgttccgatacgatatttcgttcttaaagaaaaggcactgaaccataaggtttttatcgtggcacgagtatcgatgatcacgtcatagcgttccgttttcatcaactgccggacttttcgcaagtattcaaagaagtggttattttcttcatccgaaaaggtgataatcttatctatatccggatgattttcaaacaaaggagcaatatgatcattcaacacgtaatgaatttccgcttccggaaaactctttcgcaaagagctacagatcacgacggatagtaccgcatcccctattctcctaaagcgaatcaccaatacttttcttacactcatactccttgcccttttctatataatacggggttcaattccggatcgttatacattttcatctgtttgtagactttcatgtatttacgtcccgtttctatatctcccaaaagttgattgatcgcgagtattaaatcccttttctgttccagcaacacgcttagcttatcatcacactcctttacatgtatttgagcaacctctctacgctgcacctcctgctccatgtgataaatcttcaaacacaaaatagataaccggtctatcgcccatgccggactctccgtgttcacggttgcgcaagataagattctcacgtttttatatttatcccagaaatatccatccagcaactcgaccaaatccgtccgacgttgattcaactgatctatacgccgtttgatttccaacgctttcacgggttctatatccggatcccgaatgacatcctccaaatgccactggactgcatctacccaatttttgagaaataaataatattcgattgatttatactcgtatggattctccatttcagcatcaacacaatcttgtacatgataacatgccgtactttcttcaaagatttggtagcataattctgcaaacaacatagtacccgattttcaattcaatatccggaacaaaaatagcaaaaagtgttccacttttacaaaaatcatgtactcccctttacaaaaccttgacaataatgtttatttctttatcccgaaatccgtccatgtatgttttaaagatacggtttctttacgaatctctctatttctatcccaagctttctgattaatataccctctggcatgatccaaatgtaaacaaattgcagaatatctaatttgtaaaccagtaatgccacaatttacaagccgctcaccaaactctcgatcttgtcctccatattccattcgctcgtcataaccattcacacgcataacatcctccatccacccggaagcattatgcccgttccatgttggttttgtcgtagttacagcattcaaaatagaagcaaggagcttagaagttgtcaatttattatttctaaaagaacatttcattccacgttcttttagccaacgtacattaaaacacgcttggctttcaatatccgataattgtattgcccgtgaagtttccatagataatttatggtatccacctgaaaggaaatgccccttttttctaaacttcatatgctgctcaacaaaatcctttctaggaatacaatctccatcggtaaaaataagataatccgcacttgcagctaaaatagcttcattcaagataagacattttctaaaacccacatcctcatgccacacatgctttaacggatatgataatttaggcgtgattcgtttcaacatctcccgagatgcgcttcccgacccatcatctgcaacgatcaattcaaaatccttaaaactttgcatattatatccccataaaactttttccaaccactctggctgattataagtagaaaccacaacagaaacttgcatatataccttattttaataaaaacaatcgccttaatc

SEQ ID NO: 323 - DNA, 5284 bp, Butyricimonas faecihominis
gtacatgatattgaaaacgacggtttcacggaaaatggataatcagttcctctttcttgctctatcgtggacatatacaacaaatccatcatgctagcagacaaactcaatctctccattcgcatatatttacaaatccgacgcgggaaatcatactggatattaatatttctccagataaaggttgattcatctgccacgaaacggttattagcaaccgtattcttatcattattcaaccctttatatcgagtcacgtcacccggtttctcccaacgctcactcaacacacgtttgtcaacattcaccttcggataagcattttccaccttgttcaataaagtctgattcaatttctgtcctcccaaccgtaactcgaaaccagtattcaaagagaaagatttataacggaacatcgtgctgaaacgtccgtttaccttcggaacctcattcccgaccttaacctttgcatacatatcaatatcagaagaaacccgtccgtttcgatccatataaagcacctctcccgtggcagcatccacacccggagaaatgaacgtgtaaatagcgtccatggattctccctctttatattgcaaataaacaaacgccccggtctgattattcacggtttcctcgttctgccgtttcatttcatccgaaagggtcacgatcgtattcttgttccaagacatcgcacccctcaccgaccacataatattctggttccgcaacaaatttacagatacattcaactctcctcccacgttccgaagagtcccgatattctccatatattttgggaatccatgagaataggataatcccaatgaagaaatataatttttcgtttctttacggtaatagttaccttgaaccgataatatctcattaaacaatgtcagatcgacccctatattatgctgataggtatcctgccagcgcaatttatcattaccaagtcccatcagataagctcccatatccccgttataacgttgatcacggtcatattcgtaggttgtcaaagcttgatatggattactcggcaaagcactgttcaccccgtaagagtaacgtagacgaagtaaattcatccaaggaagattttccagtacaaaattttcctgactaaccgtatacccaaaaccgatagaccagaatggagcaaaacgattctgagaaccaaaggatgaagatccatccaaccgataagaaaaatcaaagaaataacgactatcgtaattgtaattcccggtcacggtgaatcccgcttgtctggaatgtgtatccgtagaactgggacgttcattagcaaaaccggcagcgttagaaatatctgtcaaattatcattagcaaaccctcgtaaccatagtatataccctagatttttcgtttcatacaagctcccatctacccctgcaaacacgctgtgccgaccgaaagtgttcccgtaactagcattaaaactccattgccaagaacgcatttcacgatattcccacgtgtaactacccatagcatccggatctgatgtgttattaaaatcattactggatttgggagagaaacgatcacttctatctgtttgagtggtataaccgacattcgtggataactttaaccctttcacgacatcccactcgatcctgaatgtatttcggatattcgtgtatttacttttatcaaatttattgatagaagcctcccacaaaggatttgcaatcacatccacccccgtggttgaaccaaacgtattaaaagatttcacaatacgcccattctcatcataaggataccaatacggattcatggttacatactcaccaaaagacccgtatgggctatcttccgaattattcaatcctaaagagaacgtattcatgaaacgaatctgtttaagtaaataactgattcccaatgttccattaaaattattccgaaaagagcctttcatggcaccagccacgcaattgtaagataaattcatcgagtaacgaaattgttcgtcaccaccacctaaatccagcatatagttctgccctacacctgtacgtaccggttcaccaatccagtaagtatccaccccctctgctatggatttcacattttgccgatacaggaccatacgtgctggactattgtacaatcctgcacgttcctccaagtctaatttttccttggcatccaacaaatcataactagacaaatcgggaatctccaaatttatcccaccggagaaagagactcgtaattttccttgacgaggttttgaagaagtaatcacaacaacaccattggccccccgcgaaccataaagagccgtggaacttgcatctttcaaaatcgttacagactccacatccgatggattcaagtccatcacccgttccaacgtcacctcgaagccatccaacacgaataatggctggttcaactctgcccgggcatacgtctgtaagtttgttatatccggtaacccggaaataccacgaatctgaatctccggcaacacgttcgggttggaaccatacgtgttattctcacgaattacgaaagccgggtcaatattgtttagcgtttgtaacagattccggttaccatatgccataatatcctctttcgtgatatgcgttaccgctcccgtgaaactctccttcggcttgttgaaaataccggtcacgaccacctcatcaatctccgccatatcgtttttcatcacgatattcaaaggtttattatcttttttcaatcgaacctcctgtttctggtaccccacgaatgaaaaaatcaacacgagagtatctcgcttcggcaaatcaaaatcaaatttgccctcttcatttgtcgtgaaaccgatagttgttcctttcacttgaatcgtcactccgggtaacgtcatcccgtccacatctttcacggttcccctcacggtaatctttttcaacgaatctgttacagccaacgccctcacgtagtggattaccacgaagttatcgttaatctcgaacttcacgtcataccctttgaagatcaattgtaacgcctgttcaatcgtggcatccagaaaatccacgttcacccgttttgacacgtcgatcttagagttgctgtaaaagaagtccaactgtgtggattctgaaatcttattcaacacctgctcgatcgtggcatccttcattttcaagttgatacgagccgtctgcgaatgtaccgcggccgacaaatgcatcacgcacaccaaacataaaatccctgttattcgcataaccttaagaaaattttttagccatctggggggataaagccccaaatcacaattttttttcatacatttgttttttaaaggtttacaatgagtcttgtcctctatcgccaaatgtcgggcaagactgctaacttttataaatgccggagaagtcgctatacttttccggtatttttaatttactctgaaattacaattgttttccctttcacgctaaaccggacttgacttgtactctcgatcatccgaaccaaatcatccaaaggcttaaacttcacgatcgcccccgtgaaccgcacctttttcacgctttcattactaaaaaatatttccacgtcataccagcgggaaatctgcttggcaatctcttccagttccgtgttattaaacaagaacttcccgtcgatccaagacgtgtaaagacgaacattgacttcccgtttctctaactcgttttctttcccataagcctgttcccccggaaccagtcgaaacgcttgctgaccacctgaaacaatttccacgctaccatttaccagcgtggtagaaacctcctcattatcatcgtaatcattcacgttaaaacgagtacccaacaccttcacgttcatccgggatgtttccacgataaaaggcctttctgcatcatgtgccacgtcaaaaaaagcctccccggacaatacaacccgtctctcttttcccatgaaagattgaggatatatcaatcgtgatgccgaattcaaccaaacctttgtcccgtcggctaacatgacttggtactctccacccttaggaataattaattcattatttttattgacattagccatcccgatagaatcgtgtgaagaataacgtaacagatgattagaatccatctctatccggacatttgcctcgtgagcgatcaatgaactcttcattgtactatccagcataaccgtttttccatcatacaacttcaatattgctcgttctccccccggacgagaaactgcactaaattgacgatgtacccccaccggctcattcttcataccctgccacaaaaccaaagccacgcctaacggcaaaataaagagagccgcatatttccaccaataacggaaacctatttgccttcctcttccccgtttcactcgttttaatacattctccgtatcaggagcaaaatcccgatgtaaaagttttacctgatcacgtattttctttatctcggcatacacttcctcatgtcccacatcttctgccaaccaacttgaaagctcggcttcctccattggtgacaggtgatcatccaactttccggaaatcaactcatatattcgatcatctattttcatcttcatatttttacatagagtacttcaaaaatgaaaaacagggtgaagaaaaaacagattttttgaaaaaaagattttaatcttcttttatcccaaaaagaaatagtaataacgagaattgttcctgtttcaatttttcccgcaaggtcttgtaagcgattttcatttgtgtttttaccgtgttgaccgaaattcccaacgagtcagccacgtccttgtatttcatatcttccagaatcaccagtttaaaaacaactttacattgtaaaggcaaattctcaatctctccccacaaacggttcaattccggcgtttcaaattctacgacttcttccgaaacctttaaattttgtttcacatcctccagatcaacacgttcccgtttattcttcaaaaacgtaaaacaagcattacgcacggcaacaaacaaataactatcaatagacgccctctcgtcaatccgagtactttttttccagatcttttcaaaaacttcctgcacaatgtcttccgccacgtcaaactgcacgacaaacgtggctgcaaaacgacacaggtttttgtagcgagttctgaaaaggtaatcaaaggcagcttcttttccttcttttaactctctagtcaatatttctatttcataatatttctgactatcttccatcgtattaaccc

SEQ ID NO: 324 - DNA, 5269 bp, Butyricimonas faecihominis
ggtcggatattgtctagaaaagtctgcttaacgatacattttaatacgatgaaggcaaacgctctgtagcgatcaaatcaaaactcaaaatcacgacaaatctacgataatatttttaataaacaaataatcctacacgtaaaaataacacgagggtaataaaaatatattaccctcgaaaataagcactaaatcagtgacatatccttcttccgggatgctttttagcctccctttttttaaattcggtcttgtcaaattgttcttgttgcatctgatgttcgccaacccaacttttatcctgttttgaaggaatgttccgggcataccggtccccactcgtcgctctcgtcttcttttcttcacgttctttcataactttctaatttattacttcatatatctatcctatattacattatacgtcactgcaaatagagtgttacacgtaccctctcccccttaattctttatacaaaagttttgcaaaaaagaagaatctcacatcttttttgtatgtttgcagcattaaccttattattcaacatgaaagcacaactctgcatatagctacgctccttgtatagcattccgatcgcaggccccgcctgtcggaaacagaacacgtttccgggaacagagtttattatacccttttatttaccgggcataacaagtaattccactcacgtggaacaatcttgatatgtgctattcaagttgaatcatgaattttacaagcaaacaaatctggctcatcaactatcccgtgatgatgagcgtgttagtcgaacaattaataaatatcacggatgccatattcctcgggcatatcggggaaacagaactgggagcctccgccatcgcgggaatgtactatctctccctctacatattgggtttcgggttcagcctcggcctacaagtgatgattgctcgtcggaatggagaacggcgtcccgcggaaacaggaaaagtattctttcaaggactatttttcctgaccacactcgccatctcgctcgttactctttccaaagttttcacacccttcatcctgcaacatctgttgacttcgacagagatatacgaggctgtcatacaatatctggactggcggaccttcggtctgtttttcgctttcccgatgttggctttccgggcattcttcgtgggtatcaccaaaacccgtgtacttaccgcttctgccatcaccctagcgagcatgaacgtgttgctaaactacctgttgattttcggtgccggaaaaattccggctttaggaatatcgggtgcagccatggcatccacgatctccgaactcggagggctattcgtgctggtgatctacacccgcttcaaaatagacaaacggcattacggccttttccccgttttcaaccaacgactcatgggacaactattccgcctgtctgtctggagcatgatgcactcttttatcagcgtgaccccttggttccttttctttatcctcatcgaacatctcggtatcacgcaactggcgatcgccaatatcattcggagcatctccacgatctttttcgtcatcgtaagttccttctccaccaccacaggatcactcgtcagtaatctggcgggagccggggaaaggaaccagatcatgcccttgtgccgaaaaatcatccgcctcggttacttgcttggaatcccgttaatcgtgattgccctgttatttccccacgtggtcatgggtatttacacccccgacaggcaactcgttcaactagccttttggccctttgtcgtcatgttgtcaaactacatactctcccttcccgcacacgtgttctgtaatgcagtgtcaggcacgggagccacccgtgcggcatttatctaccaatgtatcacgatcgccatataccttatttacctctcctgcatcaaccgaatcggagagatccctttagcggtgtactggacatcggagcatctttacgtactccttcttttccttttttcatggtttcacctaaaaagaacaaacgaaaaaatcataaaattgtaataaaggacgaacacggtcacgaaaaactttttcagaccgtgttcgtcatgtccgacaccaactggcgctggtcattaaagaaacgaacccgttccttctccccgctcaccgtgatcagcgtggacgaacgtttcaacgagttcatccagcttttcaaccggttgaatgtctccaagtcaaaagatgatattacattcagcgtgaacgccttcaacatacttaaatgacaattctgactactcacataacaataactcgtgtcaagattaatattagaaagatagatatacatctcgttccccgtgtcctcgtgccgtcctttcgccgtaaaacgctccagtttctccaacagtaacatcaactcctcctgcaactccttcaactccccgggcgtgatcaggtttatactggcaaaaaacaacatatccgtcaccaaatagtgaaacaccaaatgatcgagaatataaaaagaggatctaacacaccgcatcccatgtaaaaaatcctgttgaatcttggccaaccggtcactaattaccatctcccgaaaaggcttcaccgaatccacgttactatattgatacaaccacttgaacaaataaaaacgcgtgatcccgggataataataacaaaaagatttgggaagggtattcgtcgagaaaccggcctcccagtccggttcattctccgcgcaagcgaatatctcgacgaaatcctgcatcatccggaaatccgcgtcaagcgggttcgcgtactccaccaatttcaattggaacggacggctcttgcacgtgtccgtctccgtcagattatccagagaaattcccaattccttggcgacagtcataacctccacaaacgtgaaggggacttctccgcgcaatcggcgataaaccgcctcccgctcgatatacaacatatcgaccaaggtatttgtcaacttagctccttgcgggattttctttcgcaattccgtcaggaaactttcatacagtgaaacatctttcatacttatacactattttcataaagaactcaagtcaaaagtatggaaaataccaccagatctccgaaacacgagaaacataatacgactatttttgacacgggtcaccccgtttttctccctattcaaacatccaacattagcactccgttccttcttttaaaaatagtcattttttctctttcctctattcttccctgcaaacaacacgaacaaaaatagaaacaatctattattaacgtaaaccgaccaacatttacctacaaatataggttacttggatgaataaaaatcccgtacctttacatcagtttaataaaacagtaataacaaatgaaataacagacatcgagtaaaatcaggttcattaaaaccatttcttttttttcataattcgttaactgggggaacatcccttgtttaactaagaaacaaaagctcgcaaacagctgaccgtgagggtccctagagctaccgggtccgcgaaatcttcaaaacaataacccaaatacacacactatcaggtcgcggacccactctttttttaatcacaccataaaacttaccacgtgctttaacctaaacaattacgatcattcgtcccattctgacgctccagccagtcaaacatgatctggtagacctttccccggacctccttgcaggatagaaccaaatcgtgcagaccacccaagaccgacacgatctccacctgtccccggatattccgtgctacctgctgaatgtctctcacgttcaatatagcatcgcgggactgcacttgttcctcattcgagaaattcgagacagacctctccgaatgtaaaaccagcacgggttttcgtacttcaaaaggttgcctcaactcccgttgtgctttatgaatagcccgaacccatcccaaattaatccggggtgcaacatgcggtttccaagccaagttatactcccactctccccgactctcccggtgcaggaatttaccatattgttccgtgaatcctccggcaatctttatccccggtaaaaaaccacccaccaatgcgacaaacgggatacacttcttcacaaaccaacttttattaaaatcaaagaaaggactgttcaacatgatgccgtcaaaaagagaactatccccgttttctttagcgtaaagcgtggcaatcaacccgcccgtggaatgtcctaacaaaacggttgtccggcttccctcctcccgaatcatttgcaaagcgaatgtaatctcctcgaaataagcccgaagatcccggatgtcattaaatttctgatgaggcaaccacgaacgcccgtattttcgtaaatccagcgcgtaaaaatgaaatccctgctcgttaaaacggcaagccatttcccgttggaagaaatagtcattaaaaccgtgaatataaagcaccgaccgaccgtttcccttatccgacaaacggcgaacaagcgtggctatcgcccgtccctcgtaatcatcgcgcaaagagattgtcgctcgttgaaatccctctcccaatatatcttcctcgtaaaaagtgtccatactcttgcctcttttttgttcttccgaccggaccatataccccatgctcccagtctcttcgccatcgaaattaagtataaattttcatacttctatacattcgcctatattttcaaaatatcccgccacccggtaatctcgaacttgacgcacgaaggctgcaactggtctcccgattccctaccctacctctatgccctactatcatccgactaaaattatccgtataacaaatatacttcataagggcatgaagattcaaacaaaaacgattaaaaaatcaatttaatcgaaggtgaatgcaagatgaatgcaggatgaatgctccttcgtctaaatgaactataagataacaccctatggagaatacaggaaaggttaaggagcctacaagcaaacttagttcagagaacaactatcttataataaaaaacaagggaaatcccacggaaatcctagggaaataatcccccttattcgaagatcattcgaagcttcctcgtggctcaaacattacggaatgactaggctccgggtaagcatcgaataatctctgagggagcgagattatttgggttaaattacttctttatccgggttggattagagtaatatcatggaagtgaatttatatggctttaccattagataatcccttgtatcagtc

SEQ ID NO: 325 - DNA, 5265 bp, Butyricimonas faecihominis
aggcaatatttagatttactggataggattttgaaggaggggacagtgaaagaggaccggactgggacgggaacgattagcgtgttcggtcaccagatgcggtttaatctagaagaaggtttccctttgctgaccacgaagaaattgcatttgaagtcaattatatacgagttgttgtggttcctgaacggcgatacgaacgtgaagtatttgcacgatcacggggtgagtatctgggatgaatgggcagatgaagaggggggattgggacatatctatggttaccaatggcgttcatggcctaagccggacgggacttctctggatcagatttcccaagtggtgcatgacatcaagcatagtccgaattcccgtcggttgatcgtgagtgcatggaatgccggggatattgaaaatatggcattgcccccttgtcacgcattgtttcagttttacgtggctaacgggaaattgtcctgccaattgtatcagcgtagtgccgatacttttttgggtgtgccgtttaatattgcctcgtatgctttgttgacgatgatgatggcgcaggtgtgtggtttgaaaccgggagaatttgtacataccttgggtgacacgcatatttacttgaatcatatcgaacaggtgaaattgcagttgactcgtgaaccccgtgccttaccccggatggaaatcaacccggacgtgaaaaatatattcgattttaaatacgaagatttcacgttgtgcgattataacccgcatccacatataaagggggcgatatcggtataatgtagaatttagagtttaaaatttagaatgaaaagattcccgaaggcggggagtattctagctctccctctgccagagaaagctaaaaggtaaaagttaaaaactaaaagtttaaagttggaaatcaaaaagcattggctttgtgtggttggaatctaaaatcataaatcattaaatctaaaattaattcgatggttttatcaataatagtagcagcggcagagaataatgttatcggaagggataacgggttgatatggcgactttcggctgatttgaaacgttttaaggccttgaccacggggcatacgatattaatgggacggaagacgttcgagtcgatcggtcgggcattgcctaaccggaggaatatcgttatttcccggaatctggaattcgaggccgctggatgcgaggtggcgcatagcgtggaggaggctttggagttgacgaaaaatgaagacgaggtattcgtgaccgggggcgggacgatttacaagaagttgtgggataaagcagaccggttgtatcttaccgttgtccatcaggaatgtgagggcgatacggtgattccgtctgttgaccccgaggtttggagagaggttgcgagagaagtggggagggcggatgagaaaaatgaatgtgattacacgtttataaattacgagcgggtaaaatgattgattaccgaattaatccgaaatataagtcattggaaaaggctattctggatattcctagtcgttttgatttggaaggggaggttattgagaataaccggaacgtgattaaggttctggacgtggaaggagaacgttttaacgtgaaatcctttaagaaacccaatatcattaatcaatttgcatatgcttacgtgcggaagggaaaagctcaacgctcgttcgagtacgcgaatacgttgttggagaggggggtgaataccccggagccaattgcttgtatcgtttatcggaatgtcttcggggtaacccgtagtttttatatttcccggcaggaagagtatgattatacttttcgggatttgcgggtgaaacgtccggctgatctggaatttattttacgggagttcgcccggttcacgtatcattttcacacacaatccatctattttatcgatcattcaccggggaacacgttgatccggagagagggtgaacaggttcattttatgttggttgacttgaaccggatcaagttcatgacgatttccccgctggtgggattgaagaacttttaccgcttgaatgcaacagatgatatgattgatattatcgcggacgaatatgcccggttgacacattcggacgcgatggaaatgactcgtttgttgaaagagtggactcatgcccacgacgagcaggtgttcaaacggaaagccaagaagaagagttagtttatcttcttttgactttgccgaatttcttgatactggtgtatttacgccaaagatttaattttcgtttcttgggtactccgtggcgggagatatagtctctggcggcgtcaagcatacggtggcagactttcccgtccagataggggtcgtagttgtcgatgatccatttgcgttttgaggcgagtgttgcatcttgaaatacgagatcgaaggcatcgggaaggtcttccgggttttgaatatccagccagtaaatatcttgagcaatagtcttgtacgtgatgaccggtttgtcgagtagtaagaattcgtacacggtcgaagaggtgtcactaatcatgacatcggccatgatctggtatttcgtgatattgtgatcctcgacccaaagcatattttcatgttcctcggccaattgcctgtattcttccatccattcactccgggttaacgggtgaaatttcaggatgagcaagacatctttttcccgggctaatttttccagtcccttttttatgaatggcagggaagttaacgacggggaaaaggttggggcatacaaggccaatttgcttttctggtgctttcggagtagtgcgtttttttcagcgtcaaaagtgtggagattttcataaatccagtcttggcgaggccatcctgtttctacaacttcaaaatccttgtattttttggcaagtgctttaaagccttccgtgaagaatgggccttgggtaaaataggagtcaaaataacggcggattacccaatgatcctttttctcggcagcgtagccgtgaaagatttgtattttcactcccggcaagtagtagggaacaatgttgcagggaacgaataggacatccggggagaaatcgtagatttcctgtatgctgtttgtccattttacctcgtcttttaacgggaaatccgggatgtttctagactgaacataccagatcacggaatgtcccccttctttattggcctcgacttcgagaggctgtaaaatatttatcgcgtatttttgttcgcaaaatagtacaattttcatgcttgtaggtgtttgggtattcgattgatggcgtcgtgaaaatcttcgggagtgtcaagctccatggagaaataggcgctcgtgtccaccggatagaaatattgtcctcgtgcaatcaagcgttcgaaggctaattcataaaaaacattatccagtttttcgtgtaggatcatgtgttccagttcttcgtgtagggcaaggagataggcatgagatattttttcaatgccgatggattcaccaatggccttttctatggaacacgttttgctgagttccgtgatttgatttttcccgttcacgatgactttgatctcttcctccccgagtttatgactgtccagtgctaggcagttagcatgaggggcatcccgtaatatttttatcatgagcggatcaaataaaatgtcgctgtcaagtagaataatttctttttcctgttgaacttcgggtaatgccaaccacaaggaatatatgttattggtggaggcgtaaagttcattgcggatgaatttgatgcttaaagaaggataccgggtttgcacgaaggattccagcatttcatgtaggtaaccggtaacgataacaatttcacggatattattttccaataaggcatcaatcgttctttccaacaaagaacgattgcctatttttagcaggcatttcggtcgatcgtttgtgagcggtcgtaaccgggaggcaatacccgcggcaaggattatagctttcatacacgttgccgggttaggatggggttgacacgacttctttgatggtgtctatcaccaaacggttttgtttttgggttcccaacgtgatccgcatgtgcgtgttaatatcttcctcgttcatgaatttgatgattaggtctttcgctttgaacgcgttctgtaattgggattttaatgaaatcgggtatttcaccagaataaagtttgcttccgagtgatacactttgaatccttccaaggcaccgatttcccgcatataggtttcccggtcttctgccatgaggtctgccacgttctggtaataatcgtttgctttcaatacggcaataccgatttcttcggaaagtcggttataacctaaatatttcgtgctataattcaagaacgaggacaaattcttcccgataaaggcaaagccgagacgcaatccgggaagtccgtagaacttcgagagggtccggatgatcagtaaattcgggaactcttcaatgagcggttttatgtatgacgtgtctttattgctaaaagacgcgtaagcctcgtcaatgacaatggctgtttcccgggggataaaggagagaatctcgtgtaactcttcttttgacaaggaatttccggtcggattgttcggggaggcgattaacacgatttccggtttttcccgttctaccgtttcccggatgctctgaatatcatatttgaacgtgttcccgtcctcgaatagcgggtagaagatggttcgtccgtttacctcgtccgcgatggatttgtagtaccaccacgaaaatttagggattaatagtgttttttgtttttgtccgccggataggaagtagtgaacgacttgttttaaaatatcttctccaccatatcccaaaatgacttgtttttccgggatattatatagttcggcgatgtaatcggatagaatactctttttgccttcgtcgtaaattcttgtgtaaaaacataatttgtccggatcaaagtttcttaaaactttttcaacttctggggcgggaccgtagttgtattcattgcggtccaagtatacagtttgtttttctatcataaattgatcgtttaataacgtgcgaaattaaataataacaccaacaaatacaaataaacgctcatttattaatcgcactaataatcaatttattacaattatttctttttgaaaaaaagtttaaattcaaagaatataaataaacgatcaatttatgatagaaaaacaaactgtatacttggaccgcaatgaatacaac

SEQ ID NO: 326 - DNA, 5263 bp, Butyricimonas faecihominis
atattcgttaatataagctttctgctttttaagtaaaaagcgcatggcgtatttccgagcttggtcatataaagacgttaggtaaaatcctttgccaaaatctagatgatcgcgtgagtgatatacatctgcgagttcaattatatatggtgatgcgtgatacagtttcatgctaacaatcctttttctttcatatattgaataagatcttctacgatgtattctttactgaacgtgtgaagtacatcgtatcctggaatcagatattctgtaaggattccagaagaacgtagtagcccgtatacttttccggcactcatctttaatgtgtccgcaaggttgcccacgcaaaaagttataaaactcaatatttcaagattcatatttttttcactgattgttattgcaaaaataacactatttctccgtaattcaatcgattcttattgttttatattcgtttgtatcttagacttttcgtaccgactttttcagcaaatattggattgggattctttaagcggtcggtcgattctccatgatataatcccggtaagggatcgcgggtgtatttcgagtaggttgaagggtactctcgttaaattttcatgcatggatcaagccaagatgaaagacaattgatcctctccgtcccgttgacttcccgttgatttcccgttgacttcccattgactaattaacgagataccggtgcaagtgtactgggattccttgttgtccccgagtcattgcactaaaaactgatcactttcatcgtcgtcccctatcgcttgtaatggtggcggaagattaacgattctatcttttttattgtaactttgcaagatcattttcaattttgcattttcaattttcaattaaaacatgatacagataggggatacgattataagtctggatattttcgagaagaaattttgttgtgatttggcagtttgtaaaggaatatgttgcgtggacggggactcgggggcgcctttggaagaaggggaggcggaacagatccgggaaaattacgagaagattaaaccttacatgaaacccgagggaattgctgccgtggaggaacagggcttttcagtgatcgacatcgagggcgacacggttaccccgttaatcgatggacgggagtgtgcgtatattatcgaggagaacgggtgttcgtggtgtgccattgaaaaagcgtggagccggggagagagttctttccgtaaacctatatcttgccacatgtacccgatccgggtgaaacaataccagaattacgaggcgatgaattatgaccagtggacgatttgtgcttgcgcccgcttaaagggtgagcaagaggggattccggtgtacgtgtttttgaaagatgctctcattcgcaaatacggggaggagtggtacgagcaattatgctacgccgcacgggagatcgagacgggaaaaatcaagttcggacgctaatttttttgggacttttctttgcggaaaaagaaagttattctatctttgcagcgcaaaagcaaaatggtggatgtagctcagtcggttagagcgtcggattgtggttccgaaggtcgtcggttcgagaccgatcttccacccgcggagacggagaattgaaattcagttctccgtttttttatttctttccggttgggaagaatggaaattcagatgaagatcaagtggcctcttgtaatataacacggtgaaatcccgttgtgttttcgatgaagacagggaacaccttcgcttcatcttcggtacaccttcgctactccctcgctcacgggcgtcagtgtggcgaaagtgttccgagaacgtgccggggaagaatattgacttgaatgttatttcaacgggatttcacccgtttttcacttgaacaggggaatgcctgccctccgtgttcctatccttgagcctcctccgtcttttcgtgagagtccctagtatttttattgatagttcattgagaccacgaagcattcatcctgcattcatcttgcattcatccttgataaataagatattttcatcgtttttgcttggatgctccttctattgggatgtatatttgtgctaagaattgttatggttgaaagaaaggggaggataggaaagggctagagaaagccaatcgaattcctagatgttatatcttctttggataaagggtatattcatggtaatattccggtaaaattttcaactgtacttgaaaattcttgtgtttgtaggaaaatattcggttatgattgaatatatattcttgtggtgtttttttgcaaggacgagaattatgtctatttttacacaatcgttgacgaaacggtgtaattgaatataaatcattaataattagaataaattacatggcaacagagaaatttttgtggagacacatagggccacgtccggaggatattgaaaatatgctcaaagtggttggtgttagttcacttgacgagttgatcgagcaaaccgtgccggagtctatccgtttgaaaaaaccgttggatttgccggctcctctaaccgagttcgagtttatctcccggatgaaggcggtagcttcaaaaaataaattatacagaacctttatcggtcaaggatattatgacacgattacccctgccgtgatccaacggaatattttggagaacccggcttggtacacgtcatacactccctatcaggctgaagtttcacaagggcgtttggaggctttactgaatttccaaacgatggtggtggaacttaccggaatggaaatttctaactgttcgctgcttgacgaggccacggctgctgcagaatcaatgacgatgatgtacggtctgcgcggtaaagagatgaaaaaagcgggtgccaacaaattgtttgttgacaaccagattttcccgcagacaaaggacgtgttgatcacccgttctgccccgcaaggaattgagttggtttatggtgattatgacacgtttgaatttaccccggatgtattcggtgctattatccagtacccggctgctaacggtgaggtccgtgattacaaggcttttgctgatcgtgtacatgcgaacggtgctttgttgtcggtagtggctgacatgatgagtctcgtgttgctgactcctccgggagaatggggtgctgacgtggttgtgggaacaacgcaacgtttcggtatcccgatgtcttacggtggacctcatgctgcttacatggcaacgagagaggaatacaaacgtaacatcgtgggacgtattatcggtgtgacgattgatgcacagggaaatcatgcattgcgtttggctttgcagacccgtgaacaacatatcaaacgggagaaagcttcttccaatatctgtactgccaaggctttgaatgccacgatggccggattctatgccgcttatcacggtcgggaaggattggaaagaattgcccgtcacattcactctgcagccgtgattttggccgaagaaatccagaaattaggctacaagctgaaagtggataaattctttgacacgttgcgtttcgagttgccggagggagtttctcaagctgccgttcgtgacgctgccttggaacaggaaatcaacttgttctattgcaactgcggttgtggtaaagtagttggtttgtcaactgacgagaagatcaacgagaaagaaattaacacgttaatcggtattttcgccaaggctgccggaaagactgccgatcacgtggaattccttgacgatcgcacggtgcttgacccgacgatgttgcgtgacgacgagattctgcaacaatccgtgttcaacatctatcactccgagaccggaatgatgcgttacatgaagaatctggagagaagagatatttctttggctacttccatgatttctttgggatcttgtacgatgaaattgaatgctgctgttgagatgttgccgatcacgtggccggaactgggtgctatccacccgtttgccccgatgtctcaggcggaaggttatcagcaaatgatccgggaaaccgaagaaatgctgtgcaaggtgaccggatttgccggatgcagtttgatgccgaattccggtgctgccggagagtattccgctttgatggtgatccgtcaatatcatatctctcgcggagagggtcatcgtaacgtgatcctgatcccggcttccgctcatggtacgaacccggcttccagtacgatggcaggtttcaagattcttgttaccgctactgacccggaaggaaatatcgacgtggaagatttccgcaagaaagctatcgaaaaccgggataatttgatcggtgcgatgatcacgtacccctcaactcacggtattttcgaggaatcaatcaaggaattgtgcaagattgttcacgagaatggcggacaagtattcatggatggtgccaacatgaacgggcagtgtggtttgaccagcccgggagagatcggtgctgacgcttgtcacttgaatttgcacaagacatttgctatgcctcacggtggtggtggtcccggtgtcggcccgatctgcgtggctcctcacttggtgaaattcttaccatcacacacgatggtaaagaccggaggcgaggaaggtattcacgctgtggctgccgctccttacggttcagttggaatgttacctgtaacttacggttacttgttaatgttgggtggcgaaggtttggctatggtgaccaagatggcgattttgaacgcgaactatctggcttcatctttcgagaaattaggattcaagattctgttcaagggatcgaaaggtcgtgtaggtcacgagatgatctgggattgcaacatgttcaataaagaatacggaatttctgagttggatattgccaaacgtttgatggacttcggtttccacgctcctaccttgtcattccccgttcacgggaccttgatggttgagccgacggagagcgagccgaaagaagagttggatcgtttcatcgaggcgttgaagactatccgcgaggaaatgatcgaggtgggtgaaggtaaagccgacaagacggacaacgttttgaagaatgcacctcacacgcataaagtgttgacggctgacgagtggtctcacgcttacctgcgtagcaaggcggcttacccgcttgcatgggtggctgagaacaaattctggccgcaagtaggtcgtgtggatgatggttatggtgatcgtaacctgatgtgtacctgcgatccgcttgagtcatacac

SEQ ID NO: 327 - DNA, 5215 bp, Butyricimonas faecihominis
aataaccaccactctatttgcttcttctttatcttttctctaattttacaacaaatatactagaacgaaatggaagcaaggaagattaagcagatcgagattactaaattatttggttacaaagatataaaatggaccttaaatgatgatatttaggttattagaaaacttaatccaaatgttcaattaatcattgctacccattctccatttatcgcaatgaatggctggctagataaaatcacaaatatttctgacataactaataaccaatgatcgaaagtattcatagtaggtttgacaataacaataatacaatcttctcccttacttagaaagttttctcaagataagttctggaagtataatcttgatttctttattctcatcacatctccaatacacgataaaattgaccttgatcgttttaaacatataccctttttgttgtaaaattttcaattttttccaaaagtctttcgagaatttcaatacaggttgtttctgtcgagtaaaacaagtatctccctcaaatactaactcatcgccactcgttaaaccatcaatatattgttgtttgtaaataaaataccccagccagacatccgtatgccccaaatgtaaacataactcatcaggttctccataatcattactattcacaattttctcagcaatttccatatttacatgattccaatacgaccagttcgaatgaatgtataaattttgttttgccctagtcattgccacgtaaagcaatcttttttcttcatcagaagaaaaggggaacccctccaaatgtaaaaaaacattatcaaattcccgtcctttcgctttatgcatcgttgacacaaaaatagtttccccatcttgttccaaaaaatcttcaagtttggattctcttataaacaattctaaatccgatttatatctaccggatttatttgtttcttcaaaatctttaagaagtcgattaacgatttcaatcttagaactcttcccatacattttttgcaattccaacttggcatacttccacttctcatcacttattttaggtgcataaaattcagaatgaaattgtcccacaaaataccttatctcttgtaaatcgtacaaattaaattgatcattagactgtataagttttgcacgcaagccttttctcaacaacaatccggcaatctgtgccgcatcctcattcttcttcgtaagcacgcaagttgtacccataagtcccgtaccatacacctcttcaaccaagggaacaataagattattggtattattatagtaggtgatttttatttttccgttatctcgttgaacggcaacaatgggttctttcttcaatcgaccttgaatacatctgacaaattcattcgaaaacagtaccaaattatttttactccgataattctctatcaattcatatttaatggcatcattctccgtgatcaatttttccaaatatttagaatcagcatccctatccctgaattcataaatattttgatcatcatcgccaaccgcaataacacgcatctcttcattaaaacccatcaatgctttcaccaaggcaaattcatccttgtccatatcttgggcctcatcaatcaccaagacggtcttggtgatcttgcacaactcgacctcccgactactgattttttcgattgcaacacgaattatattcttggatttctccaaatcaccgacaaatcccaataaatcaaagcaaaaagaatgaaatgtctttatctctacaaaacttgcagcattaccgatcagtttaattaatcgtttcttaaactcggttgcggcagctcgagagaatgtaagcattaataattgttcgtgctttacatcctccataaggagcaatgacgctaatttatgaaccaacaccctcgtttttccgctccccggaccagccgcaacaacaatatatttagatttattgtccctgataatttttaattgttcaatggatagttctccaaaaagctgctgaaatttagacggtgtaatattccttgccaactctttctgcctgctactgctaaaatatttgtttaaaaaagaagtatgatttaaacggaaataatcatccacgaattgtaaagcttccttgtaaccactaatcatctttttcgcatactctccgacaatatggatctgttctgtcttatttttatagaattgatcgagtttcccgtaatcattactcgtgtactgtttataattattcttttctaatctctcaatagttagcttgttataaacgaccaaaaatccaccttcaattttaattgcctctatacgagaaagataaaacaaagcattttccacgtcagcaagtcccacgttcaccttaaaaagagcttgctgtttctcgtacgcatttttcagttcaagaacagagaactctatcaagacctcatcattcgaggattctaatatgatttttttattcttctcgtaaatatactccaaaatgaattttgccaactgttgccgcttttccaaccactcctcgatcttctctttaggctgtttaagcgccaaaacaacatgatttttagaataattactactatcatatcgttttcgattcagccacttctgtatatcccaaaaattaataatcgtttttattttatcaagagtaacatttttatcctgcccccctgatattccttcattaagttcttttaaattatacgtgtttccctcttcatttaaaaccgattgcaagtaattttctactttacaatatgtttcaaggatggaaagcgagcgattacatttttctcccttttttataaaagcggtaagatcctttgcatctgacagtatttgctcttcacgcatcaagtttataatgtgaatcacgtcttcccgtgcaatgcctaaatgatcggaaatataatcaacccgggattccgcaatttcatcgttagtatgcctgcgacttctcgtcgaaaacagtttctttatgatccgagttgcatattctttttgtttatcatcgaaacggaacgactttctaattttcgtgattgcctcttccgcatttctcgttagaatactatttgcaaaaacccgaggcgtattctgacctcgtttcaagtaccctgcttcctcaagtgccgcaatggcagatttcactcgcgtttctatttcattcagattatcatcccaacccgcttttcgggcaatttctattgccgaattagatatttttgacctgaacccagtaagatttttaatagccttccagatttgttgaatctctttctggttcaatcgagtctggttaagtaacgtgaaatgcttgtccaaatcctgttcattaaacaagacataacaatcagccgttatgttttcatccctccctgcccttcccgcttcctgtacgtaattttcaagagagtcggaaatctcataatgaataaccatccccacatcctttttgtcaacccccattccaaaggcagatgtagccacgataattcgaacttcccctgccataaaagcatcttgattttcttttttctgcttcacatccattttcccgtggtacgcacgcgcatcaaatccatcttctcgaagttgttccgcaagcattgctgccctatgtgttctggacgtgtacacgatgaccggacaatccttagattctagcagattacgcaacacattgtacttttcttcgtcacttccattattataaacttcataatgaaggttcgtcctagaggtattggcagcaaaaagttcaagttccaccgaaagcctatctttgaaatacgcctttatatctcctattactttttgctttgccgtggctgtaaaacacgagatcggtatgggttcattaagctgtttttcctcctgtatcaattttataaagtccgcgatatacatataatccggtctaaaatcctgtccccataccgaaaaacaatgtgcttcgtcaatcacaaaccgggcgattttacgtccaagtaataaacgttcaatggttttagaacgtaacgattccggggcaatgtataatacacaagccgaaccattttcgactctttcgatagatttagctctttcaatcggatctaataaaccgttaattgtcacagcgtcagtaataccacttttttcaagattatccacctggtctttcatcaacgactgcaagggcgaaatcacaatcgtaagcgccttcatattctctccagccatgagtgccggcacttgaaacgtcagagactttcctccaccagttggaaatattgccaatattgatttattggtaacggcagctttcacggcattttcctgcaaagcctcttccgcatatttcctatacgagtcaaaattaaaataacgctttaatgccacatggatgtccagtgaacgcctgcaataagaacagcccgttaaacaaggattacctcgtaacaaatgcatgacgttctccacccctggatagtttttaagcacccaacgtggtgttattgaataacggtttcgagcgtgtatcaaagcaagacaataagcaagttctaccggatactgatgtacaaaacactcaaaatcagccttatcacaaacttctccattgaatttttgcctaattaaagtttctaccttcaaagagcttgcagaataatccatgtaccgaaagaaagcggaaaattcttctatatcacttaaaagcagataataaatttgtttcaattcttcatccagttgcctaaatgcattttcctcatcatgaaacaatcgctttgctttttgagaatcattaagagggttgttataattttccggatcaagtttatcatctttaacaagattgtggtatggttgagcaggaaataataaaggtgaaaaataaagtgtatccactctattgaaactgtttatttccggcatcactttttccatatatttcaaatcatgcttgaatatattatgcccacatacatatcccgttccatctaagaaatccaaaaaatctctgatagaagtagaatgaaatgtctctccattgctttttataccccctatatcagcaataccgtgactattagcatctatctcaagatcaaaaaaagtgatggatttcataagttacatttacctacatttctattcaaaaaatatctctatcaatccacaatgatcatttacaaatatattaaaa

SEQ ID NO: 328 - DNA, 5212 bp, Butyricimonas faecihominis
atttaaatcagaatgaaaatgagaacattaaaatatatgttaggattggggttattcgtgttattatttgcaagctgtgatgatgttgacgatacaccccctcgattggtggatatgaagactgaatttgtactaccagcacctagtcgtttgacaaatgctgaacgggatattattcaggctaaaagagatgcttaccaagaagcgattggaaattaaggagtttgaacgaataaaaagatatagttatgcgaaagattttatttgttttctcgttattgatagggctaagtcttatgtcggcttgctcggatgatgataatagtgatccgaagttgagtttcggacgctctatttatatactgaaagcggcagaaccactggccgtagaattaatggtttcggaaccggtgacggaagaagtgagagttcctttctcgatcgacggtactgccgtgttggatgaagattacacgatttctgccaacgagtttatacttcatcccggtgatgtgatcgatacgatttgggtgaccccgaaggaaaacgtgatcggacaacgggagattcgtttgagtttacaggaagttccaaattatcgtttatggaataatcgttgggcgattatcccggtggaaacgaaagatatttttacttgttctttttcacaaaccacgatggatttgaaaagtgaaattgttgtttcgatggggttaaccgtgaaaggggttgattatatgtataaacgggatgaagttcgggtgccttttgaaatagacccggcatctacggcggtagaaggcgaacattacgagattgttggtggtggtcgggaattggtactgggtatcatgaaggcaacggccgacgtgacgattcgtttcttgaagaaagaggccggtaaggacaaggtgattattcgtttggttgaaggtggactttttgagggagggacgaatgcttccgttacggttaatgtgaatggaccgactttgtatgaggactttgtaggaacgtgggtttcaccgacgtttatcagtggagattttattaagggaatggtatggggacatcctacagactgtgataatcttccggtaaataatttatctacggataaaattgtttttgcggcgggtgctacaaacacgttaaatgtggatggtgtacagggagacttggctagataccttcggaattgtgaggtcgtgtatgtcggagaggctccggaacagctatgggatcaagatgcctatggagttaaacgggacgtggttactttggaattgagtaaagcaaatgtgaattattcggtgacgagtataacagaaagaaaagcgattgtacttgtacgcttgttgagtaaaggtaatgtgcttgaattccgggtaattgattatgagccgacagatttcttgacagggacatactatgatgaaactcatccaagttatggagaacctaaagagtatcctatgagggagttatatccactggtgttccgtttcacgaaagttgaataatgagtttataaggttcataaagtttgtaaggtttataaagtttatgaactctctacgggaagttttgttcatggctgctctggctaccgaaggccgcctgtcactttatgaaccttataaaccttacaaactttagaacctcttttaatgtcttaatataaaattgaaaagtatgaaaaaatggatgctagtattgttcgtggcacttttcgtgctaccttgttcgctggatgccgaggcagccgggcggaagaagaaaggtaaaaatgccgtcacggctaaggtggcggagaagaagagtgcttatgacaaattatttcagaaaaagtcgtgcgagacggtgaagagtaatttcatcaccttacataaggtggatgggaaattgtatttcgagattccggtgaaatatctgggacgggaaatgttgtttgcgtccacgttgacctcgacttccagtaatgatttctgtgacgtgggttacaagcaaaatgacccgttacacgtgcgtttcacgaagatcgacagtactatttacctgaatgaagtaaatgctttcgtgacctcgaatccgaaagaaccttccctgcgaaaggctattgacaagaactttgcggatgccgtgttgtactcgtacaagattgcagcttacacgccggacagtacggccgtggtgattgatgtgacaccgatattcacgacggatatgaaagaatttgcctttcttccgacgacgattatgggattgatccagttgaattctgtctttaacaaagatggggttgctttaggagaagtcaaggcgtttgatgataacttgagcgtgaagtccatgttatcttataaagtatcgttgaaattcatgtcgttctcgttcttggataatatgccgttgacggccacggtgactcgttctctattgttactgccggaagagaaaatgcgtccccggatttccgattcacgggtaggtatttttatcacgagtaaacaacacgtctccacggagaaggatgggattcaggattatacgctggccaaccgttggcgtatggagcctaaagatatggcggcttttcagcggggggaacttgtggaacccgtgaaaccgatcgtgttttatattgatgatgcttttccggaattgtggaaacaaccgataaaggagggtacgctacggtggaatgaggcttttgagaagattgggtttaagaatgccgtgcaggtacgtgattttccgaaggatgatcctgaatttgatccggataacctgaaatattcctgtattcgttatttaccttcttcgacggcaaatgcgatgggaccgtcgtgggtggatccaacgaccggagaaattgttaatgcctctgttttggtctataacgacgtgattcgtttgattaataactggcgtttcgtgcagacggcacaaattgacccgtccgtgcgggcgaagaagatgccggatgacatcgtgaaagaatccattgcttacgtggtggctcacgaggtggggcattgcctcggtttcatgcacaatatgtcggcctctgccgcttacccggtggattcattacgttccgcatctttcactaacacgtatgggacaactccttgtatcatggactacgcccgttttaattacgtggctcaacccggagacaagggcgtacgtttgaccccgccggatttgggtatatatgattgtttcctagtgaaatggaactatcaacccttaccacaggtgaatgatgaatgggaagaacaagctattcttgaaagttgggtggacgagaaagccggagaccctcgctatcgttatggaaggcaacagatttattcccgttatgatccgagtgctattgaagaggacttgggtgacgatccgatgaaagccggggagtacgggataaagaatttgaaatatatcttgtctaatctcggagaatgggtgaatgacgatgcggatttcacgcaccgggaagagctttacaaacagttggcaaatcaatactatcgttatatcatgaacgtgatgtataacgtgggtggtatctacctgacggaagtgaaagacggtacgaagggacagcgtcatgagccggtttcaaaggaaaaacaacgggcttctttggcgtggatactgaaagagttcaagtcttcggattggttgagcaagacggatttgaaaaagaatttcgccatgggagtggacatgactccggtactgcaaaaaagaatactggaccagttggaacgtttgaccggaaatatcatattgtcatctcatctcgcatctaatccgtacacgattcaggaattcctgacagacttgtataatggtgcgtttgaaaacacggtgaaaggacgggctttgacggatgccgacaagatgctgcaacaatttatcgtggatgtttccgccagttcgttgaaagaggccggagggggagcgttgcggatgttgacggatgcggcttatatgccttccgtggaagagattgcggcctacggtttggatgaaaccggattgattaacaagtatcttgatcagttccgacaagtggagcaagaacgtggtcccggctacgtggcacaacagatggcattaaatgaatttggttatggatacggtttcgtgcggaaagtgaataccggagagattgataattctaaagtgtacttgcaggatatggctttgaaggctcaacggcttttgaattccaagattgcgggggcgacaggtgacacgaagattcactatcaatcgttgttgatgaagttgaataagtctttgaaggatagtaaatgatgaacgggactgtccgataagtcatttttcaaaactccctccccccttcggggtactccctctataaacagagggagagctgaaaatactccctgtcttcgggaagagtcaccagcttctcctctgtttatagaggaggtggcacgaagtgacggaggagttttttgaaataaaataactttttggacagtctttttttatgattctaaactctcgtagaagaatttccaaagtgtatcattcataggtggaggggcgacgatcgtgatcttttcctgtttcaccggatgagtgaacgtgatcgaccgggcgtgaagactgattccacctccctcgttggaacgggggaaaccgtatttcaagtcccctttgatcgggcagccgatctttgccaactggcaacgaatctggtgatggcgtcccgtgcaaagttttacttccaataaatagtaacgttgtccgcatcccaataatttatactcaaggatggcctctttcgctccacttttgggtttattgtaagcataggatttattcttttcagcatcccgcaccatgtagtgggttagtttggcatgatcttcttcgggaagattgcccacaatcgcccagtatattttggtgatctcctgatcgtgttcttgaaacattttgttcagccttaccagtgccttactggttttggcgaacaatacgactccactcaccgggcggtccacccgatgaggaattccgaggtaaacatcccccggtttgttgtacttctctttgatgtatgccttaacacgctcactgagaggttcgtctcccgtctggtctgcctgcacaatatcggaaacccttttgttgatagcgataatgtggttatcctcgtataata

SEQ ID NO: 329 - DNA, 5147 bp, Butyricimonas faecihominis
ctaggatttgcctcatattctccaattgtagtggctgcgaaattattgataagacgcatataaaactcaaccaatgaacttttccccgatccattttccccaactatagcagagatactgatatgaggtgtctgggtgtcagagaaataatcttggtacaaaatatctgttccaagacgatatggttgtatatacatgtgaccatcatcgttgatttcaaaaccctctaataaataatatatttgatgtggttttaatttcctttttcctatactatcttgggataagacttttatggcaattggagttatcataagcgaagttttaaaataaaaacgaaaatacgaaataatttgtaaacagtaagtaatatgacacatcttctcatgagggtatataaaaacatatttattcatatttttctcccgaccgatctatcctctttttttttattacttcaaggctattttgtagatcttcattgaagtctttactgatcgggaggtttatttgtatgtttgtatttatcgttaatagagctttgttgatcgagatcaggctctccatcgttcgagggactgttattttaaattgattgttgacaaaatttatacgaatgcccggtacatcttcaagtaactggcaatagttattcgagatcgtgtccatgctgataacaaagctaaacgcctttatattctcatttccccgttgaatgagatccggcgaaataggaatagcttctccttccgctaggctcaattgaattccggcactgtacgccaaaccactctcgtctttatcgaaagcggttgtaattcgtggagttgtaccttggtatttttctatcgtttcgatatgcgagaggatattctttatttgctcttttgtaaggtatccctcgcaggcaatataaagaagatcctgccggctgtttcgatgaagttgataatgactcatgcaatcaatatcactctcgcaaatgatcacttcacttgcattcttgtagtcaagcgtggatagtccgattgaatgaagtttatccgacccttccgtgaatattttcacgttctttttcgaggttgggttataatacctgcacacgacagcttttatttcatcttcacgattaaataaaggaaatgccaagttgtagtacccgtaactgtttttacttaagccaatgtttgtgaaaactggagatgataaaatgttctcgaatatccctctccgtttcaaataattaaaaccttgtgaatttatatctttctttaccgggtttatatatgtttcgtcgtccaggctaaaatcctttttaggttctctcgacatttgctgacctgtaatcctgatctcgtgctgccgaccaagaaaatccattagccggttatatgttttttctagtatattactcccctggcaattggcaagcacttcgttctctctggcttgacaaaaatcaattattgtaccattatcaggcttgttaatggacacgtataccgtgtatttatccccatgttttaagcggattttgtctccgttgttttcgtacacgggatttcttttggtacttctttttttgtcaagcgtgtaacctagagaaacgatgaatttctcaaaatctactgccgcttttagttcgtttaaagtcatttttttctatttcaatacaaatatagtaattctttctttacacatcgatcgctaaagcatcccggttatacagccaatcctcgtttacgagatctttcttctgggaccggcatctcctttaagcatgattccgcgatttcttttgaaatcagtttcttttggtacaggtctgatattatcgctttatcttgttttaactctatcggcatgttcgggagaacttcgttttggaaaaagaaacgattctgggaagggtgaagattatcatgcaagaatcgtcctttcccgataaaagattggtagttttgccagaattctttatttcccgtgatgactttgggaatctcgttaatcaagttcgtgtcaatttcggcgagcgtgtgccattccaagggagaaagcgttcccgggggaaaatgccttatcgggttatccatcttcgaattggggtgatcttcgctgtaatcgtgctcgccttcgaaataggacactttttcttgtgttcgtgtgggacattttatatagcgatgttgtgcgtaaaactttaccgaatcgaaaatttcctcacgtgtggtaggtatgttgttaatgactttcacgtatgcccaaagttctttgccgaaatgatcactaaggtctttttctaggtatgcagggggaagttgcgataagaatttcgcgagcgagaccgatggcgtgtagaaatagtcatcttctaaatttcgactgtttttttccactaatttgtatacctgttcattagaaaagtcggtacgaatatatcgtaagtttccggtccaaggttcgcagcatacctgagaggtaaattcgtaatccttgatatcccatggtacatttttgaaactggcgttatcgatgaaatggtgcatgatctctaagcataactcttttgttttttgagagtcattcattaaggcgagagagtctccatcacaagcttcttttagaaaatctatttcccgtttcatttcagggataccggctgtatgaatagatttgagatattccgtgtaattttccttcgtgtactctgccgggatagtatcatacgagatccccgtgtgattctgtaaataaaatagaacatccggcagataatgtttcggtattttatgctcgttgtaaaccgttgataatttgttaagtgataagtacggcggtgctactggaagggcggcatattgaatatacacgtctaatttatccaatttgcatgaggtttctttgatggcgttctctaatgtatcttttgggaatagttgtacgaattcaataggcttcccctgggagtccgtgtacaataaacaatctttattctttttgggataaagcattctaaaaattttttcaagtgtattcataatctttatttttgaggtgagatgatattatatgttgtcataaaaatcttgatcaagttccggatcctcgtttggctcgttttctgctagtatattttgtgcgttgagacaatttgctaaatcttcttcgtattttctccttttcaagtatgccggacggaaaagcgaacgtgtggatgggtcatttattaaattatcaacgagttcctttacttcttctctgatttcttttttaatgttgtaataatttgcccggataatggctttcatccaaatcgtcacgtaaaatcgttttttgttcccgttatagatcccgcaagaatggatgaattcaaaatctaatagttgtttcatgtagtaggacagtaaatcgtcttttaattcgtcgaaagacttcgatgtgagttctttctgaaaattcaatttgattttaatgacatctctggttttaaaagacaagtcttcaacgttaaattgaaaatcacgaggattaaatacatagatattatcctcgtctgatttttccatgatggtttccatcatggaaataatttccttgttatccagtttaacctgaaattcgttccataattcttccacgtagtcaaattccgcgttttctttttcaaaacgggtaagaatcgggatatcgacaaatttttcttcatccgcttttatcttcttgccgtcaatgtttaccttgcaattaaataatttcaaatcaataggctgggcgaaatcatccgcgacgcgaccaacaaaaaagccttgcgttaaatttgaaaccttactttccggaatgatgaaatcaagttgttcgttgattgattttgatacatctccttctgccgaaatagagtaagaagtacggttttgtaaattcttaccaaagaagttagaaacgaatctcgcggtttctccttgtacctgtccggaaaacacgttggcaattgtattaacaatagcttcagcttgctctttgctataatcccgtgttagctgactgagatcctgaatacctataaaaactgccactttgttttcacgccctgtcgcgattaagttatcaacaccggtagggtttgtcgttgacatctcatccagataaatagatgatttcctttttcccttctggttaatttgtttgatgatctgacttgaatacaaagataacagtggcgcgtaggtatcctttttaagcgggttattacccgctgcaaccaccttcggttcaagcgggtcattcacgtcgagttgaaaatcttctcccgtgcaagtccaccacagggattccccggcaatggcgacaagaggcagttttgccgtggcgatctgtccttgaatctggtcaaccgcgtcttccttgaaggcatctgcgaaaggctgaacgattgattcgaggttcttctgggacattaatattggcaatagttcatccagctccacgcctaaaaattctaccgcgtgggcgaaggtacagtatctccccttcttgaaatcctttaaaaacatgacaactgattgtagaaagttatccccggaaagtttgaaaaactcacctttatttttcatgttatccggattcaaagaaatcataatcgttgtggcgacatccctgcaatccgtgtcggatttcacgagtttagcggtcatgggatttgatcgatgggaaaattccggttgatcaaagtttatcacgtaaaaatccgcgttcgtgttgccgtaagctttctcttttttcgcccacaagaaatgattatatgcgaacgtggtgagtgacggatatttgaagtcatagagatacatgcaaaatcccttgtgtagcatttgctcgattgatggttttataaagcaatatgttttgcccgaccctggggtccccatgaccaggcaggctcgaaacgggttaattatgtttatccatccgtctcgacggactaattttttgtgcttatcttttatgtaataatacatgggaagattaacgctatactcgttctccaactttttttcaaactgggggaaagattcttgcacgttgttgaatacatcactatttggctccatgtgatcattaagacgaatacttaggaatcccaatagtagagc

SEQ ID NO: 330 - DNA, 5141 bp, Butyricimonas faecihominis
atgtagagattatgtatatttaggggataaaatcaaaaacaaaaccaactcacaacacgatggaaaaagtaaatgtaaaaatatgcataggaaccatgtgctatgtcatgggtggcgcagagttgagagacacgattgaatctcttccccaaaatatcctcgaacatctgaatgtaagctattctccatgtttagggtgtggcaaaggtgagcaagccccaccgtttattgaagtaaatggaaaacgtattgctggcgttagtaaaaatagtttaatacaaatcgttaaagaggaagtaagaaatgttatatgacaattttgcgatgctcacgaaacgtgagttactgattagaattgtaaaacttttaaaggaagaaaatctagtaaatggggtgaagtacattccagtggaaatgcgcccaaaaaataaaagaccgatcaagtgttgcgtgcataaagatcgctacatcttgaagcataagattatctctatcttgggcttcgagatcacggacgaggaaatcgacctgatccccttgtctgaattcgcacagaaagcacttgataacaagaacacgaaagagaatattctttccgtggttcatgaggcttgtagtgcttgtatgcaatcccagtacttcgtgaccaacatgtgtcgcggttgcgagggacgtccttgtttgatgaactgcccgaaagcggctatctctttcaagggtggtaaagcttgcatcacgcaggaagactgcgtgggttgcggactgtgttctaaagtctgcccttaccacgcaatcgtgtacacgcccgtaccttgcgaggatgtttgtccggtgaaagcgatcaccaaaagcgaagacggaaccgagcatattgacaaagataaatgtatctattgcggaaaatgtatgcaaacttgtccttacggggcgatcatggaacgttccaaggtgatcgacgtgtacaaaagcattaccgccccggacaagaaaatcatagctattccggctccggctatctacggacagttcaatgcaactccgggacagattctttccgccatcaaagccatcggtttcgatgacgtggtagaagtagctttgggtgcagaagatacttcccgcaacgaggcagccgagttcttggaacgcatggaagaagggaaacctttcatgaccacttcctgctgcccggcttacgtgggttgggtcgacaaacacgcccctatggtaaaaccatttgtttccgacacccgtagcccgatggtttatgccgcccgccgggtaaaagaacaatatccggatgccgaagtcgtatttatcggcccgtgtctggctaaacgttacgaagcagaaatgtacgttccggaagtagactacgtgatgagtttcgaagaattgggagcattcatggtagcttatgacattaatccggaaacttgtgaagaattaccattggatccggaagttacgaaattcgcccgcggatacgctcaagccggtggggttcgcaatgctattgtagaggctgttggaaatggttacacgactctttccatcgaaggacttgacaagaaaaatcagactttactgaaaactatggtgaaaaaaccggaagcccagtttgtcgaagtaatggcgtgtgatggtggttgcgtgaacggaccttgttcactagctccgcttacattagccaaacggcagatcaaaaaagcgttagaaaaataaaataagataacttaaaataaaggcgcccccattggagagcgcctttatttttatattcaaatcattaatttacttcaccatcgcgtgacgataccctttcgtcttgttccaacctccgcgagtgaaatcgggaatcgccaccggggcactgttattctctaaagaaagagcagtcagctcacccaaacaacaccattctgccaaatcatacacgtccatatctaatggtaatccattccgcaagcaatataccaaacggtaatccatgataaaatccattccaccatgtccccccacttttttggcttgctcttccaactcgatctgaatcgggtgtttatatttttccatcagggccttcttcacatcctccggaacaaaaccgtgagaattcaaatcctcgtgatcgggagccacatctgatgaaatttgtgttggtttcaaagcatatcccgcaaccggatatttattggcaaaccctttcgttcccgtcaattggtacatccggctatacggacgaggcgacaccacgtcatgctgaatttggatggttttcccgttctccgtgcgaatcaacgtgatcgtgtgatccccgttcttgaagtctttcacgtcctccccggtcttattcttcaaatattcgggagcagaaacagccttcgtatccatacataccaagtaattcattttgtccccccggtgaatatccagcaactgacaagccggtcccataccgtgagtagcataaacatctcccctgtgtttccggttataatccatacgccagttattccagtaataaggccaaaattcctccaaattatgaatataagccccttccacgtgcaagatttcaccaaacacaccttgttgtgccatattcaacgtcgtcaattcgaagaaatcatacacgcaattctccaacatcatgcaatgcaactgtttcttctctgccatattaatcaacgcccaaatttcctccatgttcatggcggcaggcacctcgatcgccacgtgcttcccatgttccatggcatacaacgccatcggggcatgatgtagccaatccgtagcaatatacactaaattaatatcctcccgttcacaaagctgtttccacgcatcctcgctcccggagtaaccggcagcctccggaatccctgctttcttcagaattccctgacatttctccacttgctccgggcgaatatcacacaaggcaaccaccttcgttccgggtatatgcaggaaccgctccaccgcaccgggtcccctcattcccaaaccgataaaccctacccgcacggtatccagtttcggcgttaccaaatttactacatccttctgcccagcgggacgctcgggaacaggcacctcaatcattaaacttttcttcgtctctttttctgatacaccattagtacaggaacagatcatcccgcacaaaatggctgccacgacacatacaaacgttattttcctcataaattgtcaaattaaaaacacaacaaacatatcacgtgtaaagatataaattttaaataacattaatacctctcccagccattagttcatttgtttttaccaataaacacgtttcatctaattcgcataacaaaccatccctcgctatcctttcgatattcttggatatataatggctatacctagccaatgaaccaagtatatctctccaaatagctaatatactacacgaaatacccgatatgcaaacataatcgtatcaagaactaattttatcgaggataaatgcaagatgaatgcaggttgaatgctcgatggtctaaatgaactataaaataactttcaggtgaatgcttagtaaacatagcctaatcccaaagtaataccagtgtagtttcctaaaatcggtttactcaattttaggaaactacaatagtatttcagtggtattaccccggataaacgagaaactgaacatacctgttctcgtcgacaaaaaacactcattcatcgggaaaaaatctctcaatatctaaattaattgtattcgctttcaacaccttatatctttgtaaaaagcaaaaaaagaaaacaagatgaatatacaaacgaacattgcaaccatcctttttataatcattccgtccttagtgggcttttctcaagaaaagcccacttcttcctggaatttgaaggattgcatcgattacgcccggaaaaacaacattcaggtgcaatcggcaaaagtaacacaacaaagcgctaacgtggatttgttacaggcgaaagcccagctttttccctcgttgacatttagtagttctcaaggctggggacaccagaaaacagaacaaacagatggtaaattcaaatcgcagaacgcctacacgggcagctacaccttgaacggcggactgacaatctataatgggggtaaattaacccgttccatccgtcaacagcaaatcacgaacacggcacaggagtatcaggtaaacatggccgaaaatgacatcgaaattgccgtcaccgaggcctacctgcaaatactttacgcgaacgaatcgctaaaaaccaaccgacaaacgttggaaacttctgccgcccagctggcacgttccaaagaattactagcagccggttcgattgccgccagcgattatgcccagattgaggcacagtacagcaacgatcagtacaacgtgacgatggcagaaaacacgctcaccttgaataaattgcaattgaaacaattgttagaactggaaccgacagatagtttcgacgtctatttcccggaactggaggacacgcaagtactcacccccgcaccttccctcttggaagtttaccagatcgccctagaaaccatgccagaaatgaaaaacagccaattgaacgtggaatcggcacagctggaagaaaagatcgcggcaggagatcgcttacccagcatctcgctcagcgcatccgtgggcacgaaccatgactcggaatcagaccactctttttcaaaacaactaaataatcgattaaacgagaacgtggggatcaacatcagtatccccatttctaaaaatcgccagatcaaatcagccgttgaaaaagcaaaattacaaacggaaacagcccgtctggaagaactgaatacacgcaaggaactgtggaaaacggtagagacactccaccagaacgtgatctccgcacaaagcaggtatgtcgctgccacgaacagcgtgaaatcggccacgatgagttataatcttgttcaagcacaattcgatgccggcatgaaaaacacggtggaactactcacggaaaagaacaattatctttctgccttgcaggaacagattcaagcaaagttcgaggcaattctttcactcaaactactcaacttctaccgtaatcaacctatcgaaatctaatgt

SEQ ID NO: 331 - DNA, 5127 bp, Butyricimonas faecihominis
gttacaataattatccgaagttctatctttatttagacaaaatttaatttagacatctaaattctctacccgagaaacgttctccacacccttcagagatgcgatcttcatcattaaattattcaagtcggccgtgttatgcacgtacaaatggatcatcccctcgaaaatcccatccttggtttcaaaatgcaccgtcctcatgttcacgttactctcttttgatataatcatcgtaatatcactcacgattccgatgctatcaataccgtttaatttgatcacggcaaggaaagacatgatcttgtgactgacccatttcacgggaacaattttgtccccgtaactggacatcaatcggattgcctccgggcatttccgtttatgcacagtaatcttatccccatcaatcttcatgccaacaacatcgtcacccgggatagggttacagcacggagcaatgataaaatcagaagcatcatcgataatatcattaattactttccccttttcttcttctttctctttatccggcacgggcttatccttgtcgctcttgaagaactggagtttccaatacttgacaaatttattttctgacttcttctttaaggctttacgcacctcctctatgtccaaatgtcctttagcaagactcacgtatagatcatctttatgctgcaacttcaaatgtaataaagccttattcagattttccgccccgaaaggcaatttcatatcttccagcaatttttcaaacatggtagttccgatacgaatttgctcttttttctctctccggaaaaccataagtatattattccgagccttagcagtaacgataaaatcaagccaatcactctgtggcttctgtttatcgctggtcagcacctcaacctggtcgccactctgtaaccgatgactcatcgggaccagtttgtgattcaccttaccgcctatacatgaattcccgatctccgtgtgaatatcataagcaaagtccaaaacagaagctcctttcggaagtgttctcatctcccccttcggggtaaacacccggatctccttggcaaaaagattaagtttaaattcatctaaaaattccaacgcatcagttcccggctgctccaacatctccttgatacccgccaaccacttgtccacctcgttactcgcttcggcattatcccccttgtatttccagtgtgcagccaatcccttctcggcgatctcatccattcgacgagaacgaatctgtacctctatccactttcctccaggccccatgacggtaagatgtaacgcctcgtaaccattagccttcggaacacttacccaatcccgaattctctccggcttcggactatacatatcagtaatcaacgagtaaatattccaacattgccatttctccggttgattatccttcggatcgaacacgatcctcacggcaagcaaatcatatatctcttcaaaagaaatgtgcctacgctgcatcttggaccacacagaatagacacttttcgttcgtgctgttatatcataatgatacccactctctgttaaacgctcccgaatcggagcaataaattgctgatacaaaccggtatgttcatcccggtaatcatgaattcgtttctccagttcctggtattcaaccggattctcgtacttcagactcaaatcctctaactccgtcttgatcgcatgcaatcccatacgatgcgccaagggggcatatatatagagtgtttcactcgctatcttcacttgtttatgttccggcatggaatcaagcgttcgcatattatgcaaacggtcagcaatcttgatcagaattaccctcacatcatctgctaacgtcagaatcatcttacgaaaactctcggcctgcttggtcgtattagaccccataacctcgctaattttcgtcaacccgtcaacgagtgaagctattttagggccaaaaagattggcaatatcctccaccgtgtaatcggtatcttccaccacatcatgcaggagtgcagctacagccgatttcgtacccaatccgatctcctttaccgcaatcttcgccacggccaagggatgcaatatataaggttcccctgacttacgtctaactccttgatgagcttcccgggcaaattcaaatgccctgcgaatcattttcacactctcctcagtcgtcccctttcgcaaagattttatcaaatcatcgaaagccgtttcaatcatttcctgctcgtccataacctaaaacaattttaaattttagattttaaattttagatagaagaagacagcgattccattcattctaaattctaaactttaaattctaaacttccactatttcttaggagcaatcaccacgatcattttctttccctcaagcatgggagcggattccagtttcccgtaatcttccaacgcattgacaaagcgttccaacaagtcagccccttggtctttaaacagaatcgaacgccctttgaagaacacgtaggctctcaccttcgccccctcttgcaggaacccgatcgcgtgtttcaacttgaaattgaaatcatgatcatctgtttgaggcccaaaacggatctcctttacaacgaccttcacgctcttggctttaatctctttctgctttttcttcaactgatacaggaacttgctgtaatcaatgatcctgcatacaggtggatcggcattgggggatatctctaccagatcagctccggcagcttcagccatggctaaagcctcttttaaaggataaacacccgcttctacattttcaccaacgactctcacagaagcagcccgaatttgctcgttcactctgtgctgtggcttgtcattttgacctctgcccctaatttccattgttcttgctataattaatcctccttttattattattcattgtagatagagttcaactgagcttctacctctttatttatcatttccgcaaattcttccgttgtcatggatcctttgtctccctctccttgacgacgaacagaaactttattttcgttcatttcctgctctccgacaatcaacatataaggaatctttttcaactcgttatcacgtatcttacgaccaatcttttcgttacgatcgtctaaaacggtgcgaatgtcggaattatttaagaaatttacaactttttgagcataatcgttgtatttttcactgatcgggagtaccacgacctgatccggagtcaaccacaaagggaattttccacccgtatgttcgatcaacacggccacgaaacgctccatacttccgaacggtgcccggtgaatcattaccggacgatgtttctggttatcagcacccgtgtattccaactcgaaacgttccggcaagttataatccacttggatcgttcctaactgccacttccgcccgatggcatccttcaccatgaaatccagtttcggaccgtagaaagcggcctcacccaactctaccgttgttttcaaacctttctcggctgccgcctcgataatggcactctcggctttctcccagttttcatcggttccgatgtatttctccttgttattcggatctctcaaggacacctgcgcggtgaaattctcgaaactcaacgctttgaatatcgtgaaaataatgtcgattactttcttgaattcctctttcaactgatcgggcgtacagaataagtgggcatcatcctgcgtaaacccgcgaacccttgtcaacccgtgcaattccccgctctgctcgtagcgatataccgtaccgaattctgcaaaacgaaccggaagatctttataagaccgcggtttgaatttgtacatctcgcagtggtgcgggcagttcatcggtttcaacatgaattcctccccttcttgcggggtcgtgatgacctgaaaactatccttaccgtacttctggaagtgtcccgaagtcttgtacaaattcacgttaccgatatgcggggtgatcacctgctcgtaaccgtacttcttctgtaccttgcgcaagaaggcttccagacgatctctcaacatggctcccttcggcaaccacatcggaagtcccgaaccaactgcttgcgagaacatgaacaactccatctccttaccaatcttacggtgatcgcgttgttttgcctcctccatcaataccagccattcgtccagcattttttgtttcgggaaagtgataccgtatatacgggttaacatcttgttatgttcgttccctctccagtatgccccggcaacagaagtcaacttgatagccttgatataggatgtattgggcaagtgcggtccgcggcacaagtccgtgaagtcaccttgacggtaatacgtgattgttccgtcttccaaatcgttgattaactctactttatatgtttcattgagcgatgaaaaatgattcaacgcctcttgcttactaacgtctatcctgcaatactcctcgttttttcttgccaattccaacattttcttctcgatctccaccaaatctttctcttggatagcaacaccttctcccggatccacgtcatagtagaaaccattttcaattgccggaccgataccgaacttgatattcgggtaaatagcctgcaaagcttctgccataaggtgtgcagatgagtgccagaaagcatggcgtccctcttcatcgtcccatgtatatagcttaatctcggagtctgttgttataccgcgcatcaaatcccacgtgacgccatttacggatatagacaacacttccttagccagcttatggctaatcgacttagctatgtccatgccggttaccccggactcgaactcttttacattcccatcgggaaatttaatctttaccattctgctttcttttagttattactttttgtaatttacgaaccgcaaaattataaaaaaacatcggaatatcaaagaaaaagcccggcttaaacacgtctcttgtcttgaaaaagaaacagacacgaggcatgttcgagaacgaccccggatgttatttaataaatgtaaatattcgctattatttatctactttattgcattcacattgtgacccgcccccattccactcccatccctcccctattcctctctc

SEQ ID NO: 332 - DNA, 5123 bp, Butyricimonas faecihominis
aaattatctaatgaaaatttttatgacaatgcgtgcaaattattttaatctgttactggtactgctgatgggtgttcttcccatacaattgcaggcctcggaatccgacaagaatgtgattctgtacactccctacacgaaaatcgctgttccaccgggagaatctgtaaactacagtattgacgttatcaacaactacgatgtagttaaaaacgtgaacttatccgtgaaaggactgccacgaggctggaattacgaactaaaggccggcacgtggaccatcagtgaacttgcggtcctaccccacgacaaaaagaacgtttcgttaaaagtggacatcccgctaaaagtcaacaaaggaacttaccgtttcacggttgttgccgagggacttggagaactccccatcgcgatcacggtctccaaacaaggaacctaccaaaccgattttaccacgaatcaacccaacatgcaagggaactccaaatcctcgtttaccttcaacgccacgctgaaaaaccaaacagcagaacaacagctctacgcgctgatggcacaagctcccagaggctggaacgtggtcttcaaggcaaactacaagcaagccacatcggcccaagttgaaccgaatgccacccagaacatcacgattgacattaaccctccggccaacgttgaagccggaagttacaagattccggtacgtgccacgacaagcaccacctctgccgagctagacctggaagtcgtgatcacgggaacctaccagatggaactgacaacaccccgtggcctgctcagcagcgagatcaccgcaggagataacaaaaatatagacttaattgtccggaataccggatcggcagaactaaaagacatccagctatctgccaacaaaccggttgactgggaagtaaccttcgaaccggcaaaaatcaatcgcttgaaagcaggtgaaatcgctaacgtcacggccacggtaaaagcatccaaaaaagctcttccgggagactacgtgactaaaatatcggccaaaactccggaagtaaactcctcggcagatttcagaatcgcagtgagaacacccatgatctggggttggatgggcgtactggtcatccttgtcgccttgggatgcgtgtactacctgttccgcaaatatggaaggaggtaaatcatgagcgagcctatcatcgaacttcatgaactgacgaaaaagtacgggaaattcaccgctgttgaccacataaatctcgccgtccaaaaaggggaaatattcgggattctcggcccgaacggggccggtaaatccacgacaatcctaatgatgctcggattgacggacccgacttccggaacggtacaggtctgcgggatcaattcaacccggaacccgatacaagtacgggaaaaggtgggttacctgccggaagacgtcggattctatgatgacatgacaggtatcgaaaacctgttatacacggcccgcctgaaccggatcccggaagcggatgcaagaaacaaggccgaggaattactcgaacgggtagggctaccggttgacacacagaagaaagccgggaaatactcccggggtatgcgccaacgtctcggactggcggatgtgctgatcaagcaaccggaagtgattatccttgacgaaccgacatccggtattgacccagcaggggttcaggaattcatggatttgatccggcaattaagagaagaaaacgggctgaccgtactattctcttcccatcatctggatcaagttcagcaaatctgcgaccgggtaggcctgttcgggggaggtaaactcttggcagaggtcaacgtcaacgagttacaaaacgaggaacacgggctcgaaaatatgtataaccgttatttcggaggaggaaaaagccatgaataaaatacaaagtccgttctgggtaattgtccgtaaagaagtggccgaccatgtcagaagctggaaattcatcatcctgatagccattatcgcgctgacttgcatgggttccctctacacggcattaaccaatatcggggcagccatcaaacccaatgatcccgacggttcattcttgtttttgaaactattcaccgtatccgacggcaccctgccctcgttcgtgattttcattaactttctcgggccgttattgggcatcgcgctcgggtttgatgccatcaattccgaacaaagtaaaggaacgcttagtcgcatcctgtcccaacccattcaccgggattacctgatcaacgccaaattcgtgggagccttgatcgtcatcgggagcatgttactagcccttgcacttctggttatgggattcgggctaatagcgataggaataccgccgacagcggaagagtttttgcgtattatagcctttgtagtggttagtattatttacgtggccttctggctgaacttatccattttcttctcgataaagttcaaacaggccgccacctcggctttggcatgcgtggccgtatggttattcttcagcgtcttttacaacatgattatcaacttggtcggtaaagccatcagcccctcggccatggctagcgcctaccaagtcatcagttaccagaaattcatgctcaacctattgcgttttgccccaagcatgctcttcaacgaggcaaccacaacactactgatgccctcggttcgtagcttgggtcccttgaccatggaacaggttcatggggcaatccccagcccgctaccactgggacaaagtttaatggttgtctggccacaactcacgggactgattgccgccaccgtcatctgtttcgcactctcgtatggttctttcatgagaaaggaaatcagatcccgataatgcaagaggtgtgtcaaaagacttttggcacacctctagtttgtaaagttataaagttgaaccttcggttctaaaagttcataacatccgttaactttagcggtagctttgtcgatggcagccaaagctgccgctaaacattgttcgaaggcctctattaactttacaaaccttatgaactttatagactttacaaactttctcccctctaatttgtgaattcataaaaaccacattatcttcgcacgactataaaaaacgagtatgattagaacttttatactggcagtgcaaactgcacccgcgaacaacgctggaatgaatctatgggatatggtcgtaatgggcggctggttgatgatccccatatttatactgtctgttatcattatctacatcgcttgcgaaagattctggcttatccataaaacagggctaacggatgtccctttcatggaaaaaatacaagaaaccttgaaaaccggaaacacacgtgctgcgctcgaagaatgtgaaaaagaaggctcgccactggcacacactatcgccaagggaatcaaaataagcaacgaagacccacaagaaattcgtcaggccatggaagacacggccaattacgaggtcgccaacttggaacgaggtcttccgaccctagccacttgtgccggaaccgctcccatgatcggattcttgggaaccgtggtcgggatggtacaatctttttacgatatgtccatggccggaaacagcatcgacattggtcttctctcccggggtatctacaccgccatgatcaccaccgtggccgggttgatcgtcggaatcatcggccaactggcctacaattttttggttgcccgtgttgacaaaatcgttttccgcatggaacactactcctctgaacttatcgaatacctccgtcccaaaaaataattttcaattctcaattttcaattatttcgtcatggccataaaacgtaaaagcaagatcaacccgaatttcaacatgtcgtccatgaccgacatattcttcctattgttgctattcttcatgatatcctcgacgttgatcaatcccaacgcattgaaattattattacccaaaagcacgaatcaaacttcggacaaacctgtcacggtcgtgtctatcgacaaaaactacacgttctacttgaacgaaaaagtaatccctttctccatgctggagcgccgcctcgtggaagaactacgggaattggaagatccgtgtatctctcttcaagcagataaatctgttcccttggaacaaatcgtgaaagtgatgaatatcgccaaagatcacaactaccgccttatcctaagcacggaacccgaatagcctctaaaaattcatactaccggattaacacagaacaggttcacgaaaaaaaataatcgtgtagctgaaacctatcgcccaagtcggcgtataaaacctcacaagtgagcaaaacttgacattcatcgcttgtaatgattatctcgttgtagataaatatattagcaacaattgttaaactaaaactaacacagtatgaaacgtttattatttttatcattcatcgggctgtttgcacagtttctggtatcatgctatcccggaggcgctgacaacgtggaggagatggacgttgccataacgaattatgacaaaaatgcggacttcaccaagtacaccacattctcgctccccgacactattgtttatttcgtggcaaaaggagaaactccgaaccacgaattcgatgcccaaatcttacaactggtaaaagacaattttacccaactcggatactcgtacatcgaaccgactagcgaggaagatcaacaaccgagtttcattgtcaccgtatcagctttctctaacgtgaactactattatggctctgactactggtataactactggggttggtatccgggctggaactggatctggggtccgacatggggtccgggttgggggccttcatacccgtggtacccggtaacagtatattcttacagaagcggttccatcgtgatcgacatgatcgcgaccaatcaggaagccagctcaaccaagaaagttcctgtactctggagcggcatcgccgacggtttgttacaaggatcaaaacaatctattattgacagaatggaaacgacgattgaccagtgtttcatccagtcaccgtacttgaaaaaatagtaggatagatcattaattgtcaattttaaatttaaatgattatgaga

SEQ ID NO: 333 - DNA, 5119 bp, Butyricimonas faecihominis
gaatatatacacttacttttttcataacgacctatttttagaaagacacatttatcccaaaactatacgttggaagggccgggatattcgcaccattcgtctccgggtccagacctttccatttcttatcggcaatcgtgaacaaattcatcacttggaaccgcaccagcatactggaaacatgcagaaaatccaacacgttctgtggtacgctataacttaacgccaccattttcaatttcaggaaatcggccttcgctacccgaatgtcgctgtcattatacaacctgtaaggatttgaatacccggaaattccctctgaaatatcatacacgctgccagtctccgtacccaaataattattcatatccgttgagttataaggagccggataaatcgtgttatcccccgcctgtttccaacacttcagccactcgtccgaaagattcgtcaaaggatcgaccgtggaagaatcgtaaaatttcggaagacgggacacgctacccatgctgtaagcgaaattcaaagataacgacagcactttcttgaacgtcacctgcgtgtcaaatcccccggaaagcttcgggaaaatagaaccgcaatgcactaactccaaatcctgtcgtgacgcccgatgcaccttttgctcgttcttcgcgtaaaacaaaggataaccgttatcctgattcaacccggcaaaacgataagcatacatggaaccgataggttgcccttccacggccaacgtcccggccagcatctgatccaccacggtagccatgctcaaatcatcccggttcgccaacgtgatctcgttcacgttacgcccgaaattaaacccgaagcgccaatcccaatcccggttattcaccaagtccaagttcacaaatccctcgaaacccttgttcaccattttccccgcattataatacaacacgttttgccccgtggaggccgccacttgtttcgacatgatcaaatcggaggtattcttccggtaaatatcaaagcctccctttacccgcccgtcaaacaaagcgaaatcaacggccgcattccaagattttgtcttctcccaacgcaaatcgggattcggcaaccttgaaatcttcgaaaccggtaacccagtcaccctgtcccgatcccccaccgtaacaatcaggtaaggagtggcgctctcgtgaatattcccttggataccgtaagaaccccggaatgacaaattattaatccattttgcattttccaaaaatgattcattcgaggcaatccatttcacggcaaacgaataagtcggcaaccacctgtacttcgggtcactaccaaatttattggaaccgtccgaacgaatattggcattgaacacgtaccggttatcataacaataactggcaatcccgaagaatgaagcgacttgcgtgaacgaatttgtattcatcggtttatttcccccgtacgtgctgatataactcggtgtctccaccgggctgaacatctccccgaactccggcacccaaccgtatcccgtcgtggaaacacctttatactcgttccgacgagcctctgtcccggcagcaaccgaaacgtcgtgaacgccgaacagatgcgaataagacaacatattacgcaacgtgtaaccgcttttgcgagtacttccctgcgtcaacattcccccataaggtaactttgaatcggaaaactccgagtcgtactccgtataagcgccatactcgtatccccggatttcagtcactttatacgattgtgcagtcgcccaatccctcgtattcgtgttcccggtatgccacgagaaggtaccttcgtacttcaaccctttccacaactttaacctcaaagccaacaaagcgttaaaatcatccatcttggaagacttacccgtgttcttcaactctttcagaatattatacccgatataatcccgccccgtaattccggcagcccgataactcatgtaatacgaaccgtcctcgttataagccggcatggtccgggttgtcgagtaagcgtaatcaaacggattcaccacggaagaataccccgtgttagaagtcgtggcataatctatcttggccgtaaaacccaaatattcattatactccacgtcaacctttgccaatgcactgaacttctccgaatcagaccctcgggctgccccctcgatatttgaatacccctctgacacgtagtatttcacggcctccgtccccccgctgacattcaacgcgtgagtatgcgtgacatccgatcggaataacaagtcaaaccaatccgtgttcctcctctgcaacgtctccaccttttgctcgaactccgcctgtgagatttgcttgctcatcaattgctcgtaagctgcctcgtacgtttctcccgtgggtacacgtccgaaattcatattcgattcgaccaactggcgagagaaaagcacccgttcccgcgaattcatccggtgataattcttataagatggccgggtattcagcgtcaaattcccgttatacgagatcaccggacgacccaccacgccctttttcgtcgtgatcacgatcaccccgttggccgccttcaccccgtagattgccgtcgccgaggcatccttcaacaccgtgatcgtctcgatgtcctgcgggttcaatcccgcaatggcattaccgatcaaatattcggcatcctcgctatttatatccgaggccgtgaacggcacgtcctgttccagaatcaccccgtcaaccacccaaaccggggacttatttccattgatcgtagcatttccccggattctgatcttcggggtcgcactcggttccccggaagtgttcaacaccatcattccgggaatacgcccctgcaacatctggtcaatcgacccgactccctgtaccataatatccttagcctttaccgtagaaatggcacttgccgattccctccggctaatcgtctggtaacccgtcaccaccacttcctccatatcgtgggaatcatcctgcaacaccacgtgcagcatcttctgccccgtccactttacctcccggcttttcatcccgatgaacgaaaacagaagtgtcagggaatcctgtttcacggttgtcagtgaaaactcccccttcgaatccgtcgccaccccaatcgtcgttcccttgatcaaaacggtcactcccggcaacggttgctccctctcgtccttcacgacacccttgatcaccacctcttccggtcctttttgttgttgcacttttgtcaacacgatcacgccattatcatacagacacttaattcccttccccgcaaaaacctcgtccaacaaatccatcacctgccgatctttaacacgcacgtcaaaacgaggaatagcctccacgtactcactcttgtacataaaacgaatacccgtttgctccttaatctcccgaagaaactcctccacgttacaatttttcatgtccacgctgaccacctgattctgggcaaccacgtccccccgaacctgtaccagcaacacgaacattagaaaacacatcattttcatcactctaaagattttttgagccgagcgtaaatttcctttacattctccactttttttcataactttgtcgataatagattattattagccagagccaactggcgttcactacaagacggaaagacctgccagtttttccgtttttattttatgctcactacaatcgttttatttttcacgctaaaatgcgcccccgtgcttatcttcaggaaatgcaggaactcttccacctcgccataccgcttcatatcaccggacaagcggatttccttcaattcttcatcggcatacaccacatcgcaatcataccataaaaccaatttgttcatcacgtcctccagccgatcatcgctaaaaacaaaatccccgttcgtccaatcgatatacttcctgatgtcaacctctttcaccacgatcccgctcgtctccacgtcgcaaacggccagttgattcggtttcaacatcacttggctggttccattttccacgcccactcgtccctttaccagcacagactccacgaccttctccttccgggaattcacgttgaattccgtcccgactgccgccacttccaccccgttcgcctccacgacaaacgggtggtccgcatccgcttgcaccttgaaataagcctctcccttcaaccgcaccactctcttcttccccacaaaacgcaccggatagaccagctcgctctcggaattcacccacacctcggacccgtctgccaacacgatccggtactctccccctcgattcaccaccagcttgttatacaccacgtcccctgtctcttccgcagtcaccgaatcccggtaagccaccatcccttcctgttccacgtcaatagcaaccgcctgttgctcccgcaacgacttccgttcctttcccaactccaccacgtcccccgtcgaaagaaacaaccgtgccttggaagaaccgtgatggatcaccccgctttctgccaatggcatattcctcacctctcctgtccaccagtaatacccgcccccggccaagagcaaaacactcacgcaagcggcaactgccacggctcgccggaacatcgccctcttccttgccatctgccggaaacgtcgttcgcctttccggctaaccaacctttcccgcatcacccagcgctgacgcaaaaactctcgttgcaaatcctcgaaataccggcgattctcctccttctcacccaaccaactttccacttcccgcacctcctccgaagagagtgattctccctgccagtattcaagtaatcgtatatcccgttcttcttgattcatattattctactcaatattcatatataatagacatcaacaagcaaaacggttgacaagaaaatgaaaatattttcaaaaattatcgtgatgattgatttttctcctcctagagagcatattaaagatacaactaaaatcgctacctttacgaacacccttattagcaagtagcccaagtaagctggaatttgtccctataaaataaaaatttcaataaaacacctaacagttagaactattattctgtgatcaaactattataatagacttatcc

SEQ ID NO: 334 - DNA, 5116 bp, Butyricimonas faecihominis
gaaaaactcatatatattgtgctaattaatatataattaaatgaaaataaaaagacaggatacgagtattcctgtcttctcatatgtaatggatatttttttattttctcatccgctccaactcctcatcacgcaacattctctcgttcagtttttcctgcatcctgtcaatgaaataggtgcggctttcgttcttccggcgtttgatatcagtgtagaagcggtagcagtctttagaatcaaccccgaatatcttatagagaagtggggcgagctgtttgagcggcatattgccgttgttgatgcagcccatcacgtctatgccgtagataagttccacgaggtcgatggcattgcccgtccattgaagaaggctggcggtggtttctgttgcgttgttggcggatattagtggtggcacttggggcgtggcaaggaatttctgcatctttcttacgaaagacagagccttgctgacgtaggcggcaatctctcttttttcttctgacagattacgtacgggatggtgctgcaactcgatttcgatgtaggcaagcgcgatgacggtaaggttcatgtccatgccgccgttgcacagttcgatcacttgggtggcgaaagccgtgtatgccgtttccatattgcagtcgccggcttcgtttatcaggcggaaaaagtcggtttccgccagcaagaaataattcatggttctgtcaattttgaaaattacactttgttttctgcgtgcgcacatgaatataattggcaaaaaacgcggcagaaaataaaaaatccaacactcaattttacaaagtgctggatttcagaggtataaaattcagtattttttcacaaggacaaattatctccgacttaaattgtttgtaatcggaacatttattctattcctgaaaatagaaatgtatgcttgccgcacattttggctatcttgcttttttatcaaggatatagataatgcgacatacaccgttgggatagcttttcaaagaggaaagcgtccagtgttgctctggcagagccgacttaaaaaaatgtcgtccgcttccggatatgaaaggaacggtgtatagtatgatttcatccacagcgtgcatccgcagcagtccgtttatatagtctgccgtgtccggtgtggcttccgcgaggtaacggatgtttgtgcagtcttttctccattcgtgcagcattgaaatggaatagtccggtgtcacacggtaaaaggctttcttcctgatttcatcaagaccgcaacggtcaaggcacaaatcctgatgtgctttatcatataactctgaagaaagacatccgtccatcgtcagtacggcgagaatctgaactttacccataatcgtttcctttcgttaggcaagggtaaaaaagtagcgtgcaattcacactaccttcaagcgatggctctggtaaagcctttacggagagtacgtgaatgcacgctatgcgtaagcatagcataagcatcacgcaatcgtctccgtagttccaatttaccagattttcgcttgaaacgccttgcggtcttatcctatatgttggcggcgaaaagctcctgccaatcgccgtttttctcaaatgttatgcaaagatagccaaattcagtgaattacgggctatgattgcttgaatttatatttaagtccatactcttcaagtttgctgtatagtgttgtcctgcctatgccgagcagttctgcggcgacactccggttgccgtttgcctgtttcaacgcacgcaatatccgctccttatcctccgcgtcattgcgcaaggcgaagctgacagtagaggtcggtttcgtcacggcaagttccagatgctctttcatgacaacaccttcctgcgcctgcaatacagcacccataactttctgccgaagttcccgcacgttgcccggccatgcgtgtgtcagcaacgctttacgtgcttcggaactgaacccgctcacgctacactccagctctctgtttgccatatcacggaagaactctgccagcggcataatgtcttcttgacagtcacgcaacggaggaacggttatcccgaagtcgtgcaggcggtacagaagatcctgccgaaaacgcttttcattcaccgatacctccaaatcttcattggtagcagcgatgatgcggacattgaaattccggtctgccttgtctccgaccgggcgataccgcctctcctgtatggcacggagcaacatctgttgggtttccaacgcgaggtttcctacctcgtccagaaacaacgtgccgccttccgcctcatggaaatatcctttcttggcattgtccgcacctgtaaatgcacctttgacgtgtccgaagaaagccgacggtgcaagctctttggagagtgaaccgcagtccaccgccacaaatggcttgcctgcacgtttgctcttgtcatgcaacaggtgggcaatatgctccttgcccgtgccgttctcaccaaatatcatcacgctcatatcggtggcggctaccagccttatgcggtgcatgattttctgaaaggcggaaccttcacgggcgaatataggcatacggcgttgtcctgcctgacgttctttcagtatggaacggatcagggggacaagtttatcctccacaagctgtttgggaatatagtctatcgagccgagtttcatgctttccacggcggtattaacttcggcgtagtcggtcataatgatgaagggctgcatctttccctcctttcgcatccagcacaaaaggtctatgccactgccgtcaggcagacgcaggtcggcaaccacgatatcattatctgttgcctgttgcagatgtttcttcgcggttgagaggtggtaagccttcatattgcggtagccctcccgtgacagcatattgcagacatattcgcaatacacgatgttgtcttccaccacaattatttttgtcttattcatcttcgtattttctcctttcctcttctgccaaccgtattatttccactcccttatccagcacggcagtcacggcatggcttaacgcttcaccatccgggagagcatcgccacgaagcaatccgtaaagtacattcagcggttggtcggcacggagcacctcccacgaactgcgcaggtggtggatcagggaatccagcttttgcaggtctttttcttttgctgcatcccgtaccgcctgcatttccttttctgtttcagttatcaacttttccagcatgacggcttcattgccataggacaataaggcggaaaagtccggtttcccgtccggtgtcgcttttatggcacacctgtcggaaacctccatcagttccgatatggagaacggtttgaacaggcatccggcaaagccttttgccaatagttcccctttgttacaactgcccgaagcggttgccacaaccaccgggattgttggtgaattgcccacgttggacgaacgcaacagttccagcaattcgaaaccgtttatatcgggcatattcaagtctgtcagcaacaggctgtattctttctggcgtatcatttccatcagtgccgcagcatcggtgcaagtgtcgcagtgtattccttcttgggaatacatctctttcagcatcagaagtaatacctcatcattgtcaatggcgacaacatcatggaatttattgttatgataaacaggtgtattgcttgtatatccaagctgttcttcagcttcctgcatagaaatttcaactgtgaaacgactgcctttccctttcttgctgtctaaacggattgttccgccaagcatcgacacaatattacgcattatggcaagcccaagcccgaaaccctcctttgcggcggcatttgatagacgttcaaacgcaccgaacgcttgtttctgttcctcttctgtcatgcctgtacctgtatcttcaacgaccagtgtcagaactccattatcatattcagtaatcaaagaaacaccgccttcttctgtgaacttgacagcgtttgacagcaggttattcccgatttgtattattcgctctttgtcggtcaatacaatggcatcgtgtccagtcttcacggacaaggacagccctttgttcacggcaacaggcatgaactccgtttcaagtgtgtgcgtgattgctgaaatccggcagggtgacagacggggctgttccttgccgttgtccaggcggaagaagtcaagcaaagtgttaagcatatcccgcatacggtcggaggattgcagtatgttttggatatactgcccggacttatcctcacactgttctttccgtatcagtccggcatagcctgttattgctgtcagcggtgtgcgcagttcatgggtgatagtatgtaccgccttcttccttgacgttatcagtgcctcgttccgttgtacggattgttccagttgccttatcaaatcagttgtcttgtgcttgtattgtttaatgctttttgcatcacgatgtatgatgatgtaggaaattaacaacaatagaagaacgaatcccattaaaccgcctacttgcataaatgacttttcacgcatggcaactatttcgttttcccggctttgcagttcggtttgtaccttttcttctatttggcaaatcaattcttgcagttgtctgttaagttctgcattacgagctgcaaggctgtcggcttgttccgacaattggcgatcctgcactttctgttcgctgattacgtttctattgaccgaatgaaggatagtggttgatactgctggagttacttccttttttttgccgaatatgcctaagaaaccttttcgttttggctttttggactgttcctgcacacttttctgtacaataaccggaatttgattggctatcttcttgttaatagattgttgttcatccattaaccggactatctggaacatctgtcgttccttatcctctaaaagactgcgcacactatcgatgcgctctgctggataggtggccttgaaacggcagagcatactgtccattgccatacgccgtgcatggtaatgctcgatatctttatcgttccattccagtattgtttcacccaatagagaaaattttatcatttgaatattgata

SEQ ID NO: 335 - DNA, 5112 bp, Butyricimonas faecihominis
tttttattcacagagacaattagaatgaatatcagtacatctgattcaattgttctttaatcttatcactcgtgatataatcatcaaaatccattcgcttgtctatcatccctttaggtgttaattctatgatccggttacaaacggtttggatgatctcatggtcatgagaattcattaaaacgattcctttaaacgccaccaatgtattattaaaagcctgaatggattccaaatccaagtgattggccggagaatccaataacaagacattcgcatttgtcaacatcatcttggctatcatacaacgcatcttctctcccccggataaaactttcacccgtttgtaaatatcctccccggaaaataacattttcccgaggaatcctctcaaaaacgtttcacttgtatctgcagagtactgtcccaaccattctaccagagtcatatccgtctggaaataagctgaattatccaacggaagataggcattcgtgatcgttactccccacgtgaaactacccgtatccggtttttcattcccagcaaggatctccaacaaggcagtcatcgctctcggatcacgtgacaggaaggcaattttatcccctttctccacggtaaactccacatcacggaataaggtctgtccttcgatagatttactcaaattacgaacatccaaaatccggtcacccacttcccgttccggggtaaagataatcccggggtatttccgggtagaaggtaaaatctcctctacattcaatttctccaacattttcttacggctcgtggtttgctttgactttgccacgttagcactaaagcgggaaataaactcctgtaactctttcttcttctcctccgccttcttattcttagcttgagcctgacgcaaagctaactggctcgactcataccaaaaactatagttaccggcaaataactgaatcttaccaaaatcaatatctaccgaatgtgtacacacggaatccagaaaatgccggtcatgcgataccactaagaccgtgttctcgtaattggccagataattttccaaccacataaccgtctccaagtccaaatcattcgtgggctcgtccaataacaagttatccggtttcccgaatagggcctgagctaacaaaacccgtactttctgctttccacttatatctttcatcaaggaataatgcaaatcttccttaatacctaatccactcaacaagttcgccgcatcactctccgcattccatccgtccatcccggcaaactgctcttccagttcggcagcccgaatcccgtcctcatccgagaaatcctccttcatgtatatcgcattcttctcctgcatcaccttccacaaagaggagtgtccctgtaacacggtatccaaaaccgtacactcgtcataagcaaagtggtcctgtttcaataccgacaaccgttctcccggtccgaacatcacggttccccgcgttggctccaaatcgccactcaatattctcaagaacgtagatttcccggcaccattggcacctattactccataacaattccccggtgtaaacttcaaattcacatcccggaacaaagttctcttcccaaactgaatctctaaatccgaaactgtaatcattatttatctttttctaaaaacgcccgcgaagatacacgttaaaaagttgccatgcaactttttaatgcttctctccaatcccggatctccaaattgaaagtctccttaatttttgtcttatccaaaattgaataagcaggtctttttactttagaaggatattcctcggttgtcactgggttcactttacaatttgcccctgtaatcgccacgatttctttggcaaaatcataccacgtacaagcaccttcattcgtaaagtgatataccccctccaattccgggagatcatcccgttccataatgctaataatagcctcggccagatcccccgcataagtcggcgttccccactgatcgttcaccacgttcaactcgtcccactcagaagccaaacgggatattgttttcacgaaattatgtccatacccggagtacagccaagctgtacggataataatatacagacatcccgattttttgatagcctgttctccttccaattttgttctcccgtacacgctctgcggatttgtagcatctttttccgtataaggatgatccgatgtcccgtcaaacacgtaatctgtcgagatatggaccagcagacaatccagtttcacggcagcattggccaagttagccacggcatcacgattcaatttcatcgctttttcctcatcgtcttctgcttggtcgacagccgtgtatgcagcacaattaatgatcgtgtcaatatcatgcgtctcaataaaggcacatatcgccttaaaattcgttatatccaattcttcaacatccgtgtaaaacacgtcatccagcaaagaaaagctacgatttctcaactctgtacctaactgtccattcgcacccgtgatcaatatattcgccatatataattttagatttatgattttaaatttatgatttcgccgctcaaaacccactcactttagcccccttatcaactcacggactctttatcatatttttcgaattcagaatttcgactgacaaactcaggtacaatatccttcatcatcttcaccatctccgggatatttaccctagcagccaattcattcaatttattcaattcatttactacatcaaaataattatactcccgtactttcgctacccgaattttggtatgagctgtcggcaaggtgttctccttgttacttaacaactcttcgtataacttctctcccggtctcaaccccgtgtagataatggaaatctccttatccggatcaaatcccgataattcaatcatccgtcttgccatatcggcaatcttcacgggacgtcccatctcgaaaatataaatctcacctcccatccccatcgttccggcttccatcaccaaacgacaagcttccgggatcgtcatgaaataacgaataatatccggatgagtcaccgtaacaggtcccccgttgcgaatctgttcacggaatctcggaattaccgaaccgttagatcccaacacgttcccaaaacgcgtcgtgataaaacgagtagttcctacttgtaacccatcccgaatagccacacttaaactttgtacatatatctcggccaaacgtttagaggctcccatgatattcgtcgggttaaccgccttatccgtggaaaccataacaaaccgctccaccccatacttcacggcatgatccgcaacattcatcgtcccaaacacgtttacccgcacggcttcacagggattcgattccatcaagggcacgtgcttgtaagctgccgcatgaaataccacttgagggtgataattacggaacacaaaatccatacgatcaagagatctcacatccccgatcacaggcacaaaagaagtattcggaaacttatccgtaaattccaactggatattatgcattggagtttcagctgaatccagaaatatcaattgcttgatattaaaacgtgtcaattgacgacataactcactcccgatagaaccggctgcacctgtaaccataacgactttcccttccaatccttccgcaatctccttcatgttaatctttatctcgtcacgcccaagcaattcctccaaacggatttccttcatttgcggacgcggcaactgcccgtcactcatctcctccacggaaggcagtaccaacatttccaaccccaatttctgacaataatgcaccaatcgtttttgttcctcctgagcggtccgataattcgggaacacgattccatccacccgtaaacgctttaccaagcggttaaatccttcttctcccgtgataaagtatactgattcaccggataatcggtaatgcttatatctttttccgatagtcaaatacccggttaccttgtaagatggcaggaaactgttagaaactgccgtactgagcgaggcagaacaatcatccattccgaagatcaacacccgcttttgttctccatgcaaacgaactttcaaaaagtcatacaggctcactaacaccactcgcacggaaaccaacaccacggtagtcgtcatcatgtccaacaaagcccctaaaatcaatctttcattagatacctgtgggtagaatacatgaatcaaagggtaaagaatgatcactttcaaagccatcgctatccccaaacgccaagtttcccgtaacgtggtgaaacgcatcacgacacgatgagcatgtaatatggcaaatgccaaagcactaatgaccgccgccaataatgccaaatatgcaacccacgaccaaacaataggttcttccctgacaaaccggataagccagtaagcaaaaaccgttaccaaagttgaaagcacaacgtcaatccccatcacgatccagcgactcaggtatctcgtgtgtactatcttggtagctaatccattcggtccaaataaataatttttcatttaattcctttttacaacaataccgcatcccgcaacctcggatgctttttatccttctccgacaatataatatcctctaacggtaatctccaatctattcctaaatcaggatcattgtaacaaatcgcaccttcatgatccggagcataatactcgtcacacttgtactgaaatatcgcctcctcactcaaaaccgcaaatccatgcgcaaaccccttaggtaagaaaaattgcaatttattctcttcactcagctccacggcaacatacttcccgaaagtcggtgaacctttacgaatatccacggcaacatccaaaacacgacctttcaccactctcaccagttttgcctgcgtatatggaggtaattgataatgcaaaccccgtaaaacaccatatttagatttagattcattatcctgcacaaacaccgttttacttaccttctcttcaaaatgttttaaagaaaaactttcgaagaaatatccccgatcatcaccgaacacccacggttcaagcataaaaacaccttctatttcagtctcaataaccttcatta

SEQ ID NO: 336 - DNA, 5093 bp, Butyricimonas faecihominis
ctcatatattctaataatatatttcttttatacacgaactctgtgtatccaatcgctttctatattgatatttaattatttaccgtcaacaatcatcatcaaaagttatctcacagttatattccggtgatgttttccaccatcaaaacaccaatttcctttgccagcgaacaattaaaaacgagtacgtatggcaaatgaacaaatcacttttgataagctgccgcaggcggtaggttatctcacagagcagatggaacaaatccgtcaaatggtggcggcattgcaaccccaggcttcttccgacaagcatcgtcttgttgaaattgacgaagcctgtaaaatcacacgaaaggcaaaacctaccatttacacgcttgcacgtaaaggactgattccagcctataaaaaaggtaagaaactctacttctatgaagatgagctgctgcaatggattgagtccggacgcaagcaaatgcgggccatgtcacttcaggaacaggcagcggagatagtacatggagcgaaacgcaaaccaaagggaggttataacttttgatctgcacggctatgaaaacctccaaattaacagcagaaggtatcatcggcgaggctgtgcgcatcggagccaagatgtccggcggtgagttcccgatagaggtctttcctatcaggattcaacgtatcatcagcagtttgcacgattgtcagggctaccccgtggattatattgctgcggctacccttgcggccattgccgtggggataggcaactcccatttggtgcaggtgaagcgcaactggctggaaagccctatcctgtacatggcactgattggacgccccggagccaataagagtcatccgctgagtttcgctttccagccgtttattgaacatgactattgtcagaatcaggagtatcagaagttgtatgccgagtatgaacgcactatgtccatgagtaagaaggaacgcatggaagccggtttggatgagtttccgcaggctcccgtgcgcagacgctttcttgtttcggatatcactcccgaaggattgagcctgatacacgcccagaatcctagaggactctgcctttggtcggacgagctatctgcctggttcaagaatttcaaccgttacaacaacggttcggaagaacagttctggctttcagtgttcaatgccaagcctacgatttccgatcgcaagagtacgcaaagttccatttttatcagacgtccctatatctccgttatcggtaccatccaaaagaaaattctgggcgaactggtcaagggcgagcgttcgagtaacggttttattgatcgtattcttttcgtgatgcctgaatctgtcttggaaagcagatggaatgaccgggaaactcctgaagaactggaaatccagtggcaacagattatcgataagctgatcgcacaagattgtccgcatgacgagaataatgagttgcagtctcaatgcctgccatttgatgaagacgccaagcaacggctttacggttggcagcatgaaaatgcccgccaatgtgatatggaaaccaatgatgctttggtaggtatttactgcaaactggaaatctacattatccggttttgtctgattatacagcttgcccgatggacttgcggagagtgcgataagactacgattgaccttgaaagcgtgaaccgtgccatcctgctggccgagtattttcggacaacagccgtaaaagtgcagactgccgtcagtcaggaacagttgagcgaattgcaccgtaacatatacctgaatctgcctcacagatttacaacggcagaaggtatcagcattgctgaaagttacgggatgaaagagcatgctttcaagatgtttctaaaacgccatatcggaacattattcagaaaagagaatcatggagaatacagtaaataaacctgttactatgcacattttcgcaaccgaggggtttgtgaagttgcgaaaatgtgcatagtaacatccaaacagaaagaaaaatgaactacagattcacattagaaccatacaaaggtgtcagcacccggcacacatgcccgaactgccaccgtaaaagttgtttcgccaaatacatcgatacggaaaaacaaatcagctttcccgattatgtagggcgatgcaaccatgaacagaaatgcggctacaactatacgcctaaaatgtactttgacgagaacccgattgccaaagagcgattgagcgaagagtttgtgccagtgtcaaagccccgcatcagtctgcctcctgagccatccttcattgaaccggaaatcatgaggaagtccctaaagctgtatcacacgaacaagctgtttcagttcctgagtttccatttcgggcaggaggctaccgaagagctgatgttacgctaccatgtgggaacctcgaagcattggcctggagctacggtcttctggcaggtggatatttccggacgggtacgcaccggaaaagtgatgctctacaatcctgaaaacggaagacggattaaaaagccgcacaactacatcacgtgggtacattcccttttgaagaaagagaatttcaacctccggcaatgcctgtttggtgaacaccttttgtcctccgaccagcagcgtccggttgccctagtggagagtgagaaaagcgctttgatttccagcttctatttgccgcaatacctctggattgcttcgggcggaaagaacggagcattcaatcgggacgccatgagcgtattgagaaaccgacgtgttctgctcttccccgaccttggggcaaccgactattggaacagcaaaatggagatgattcggagcctaggaatagaggtttctctcttcgattttatggaaagaaacgcaacaaaagaagaacgggatgcaggttatgacatagccgattttctgctgagagaagagacaaaggaagcaattttcaatcgtcttatcacgttgaatccggccttgaaaacgctggtcgaaactttcgatttacagcttgttaatgtggagaaagcaccgctttcagcaacgcttcaacatactcgggaaggacttttcaaacgatgactgtcagatgtctgattctcttctttttcactggagcaagtttatgccggtgtattacatttcccggccacttgctcacctcaaaagaaggtgagacggctcccgatggtcacaattattaatctcaaaagcaaatattatggacaagaaaaatacagttacagtccgtcttacagacgaacaattcggctggctcagagcactcagccggcgcagtaaacgcagtcaaagcgaagtagtgcgttcactcatcgaacacggtacagtgcgcgaacggattacgagagaaaatcttgacatcatccgaaaactgattggagaaagcacaaatctgaatcagcttgccagacgagccaatgcttacggtttttatcgtgtggccgatgaatgtagtaccgccgttcaacagatttcacaactcataaaacagctcaaggatgataggtaaaattgtcaagggaacatcgttttccgggtgcgtaaactatgtgctgaaagaggataaatcgcgactgcttaaagcggttggtgtctacggttcgcccgaagaaatagcggagcaattcgagttgcagactttactgaacgacaaggtcaagaacaaggtcggccatatatcattgagcttttccgcagaagacggggaccgcatccgtgacgatgacggactgatgctgaaaatcgcccacgactatatgaaactgatgggaattgagaacacacagttcatcatcgcccggcatatcgaccgtgatcatccgcattgtcacatcgtttacaaccgggtagataatgacggccgcaccatcagcgacaagaacgaccgttatcggaacgaaaaggtctgcaagatgctgacagcccgttaccgcttgcattttgccgaaggaaaagagcatgtcaatttcatgcggttacgtcatcatgacaaggtaaagtattttatctatcatgccttgaaacgagaggttccgaacgcccgaagctggagtgaactgagattggccttacggaagtacggaattgatacgcaatggaagctaagtcgcacgaccggagagatgcaaggtgtcaagttcacatgtgaccaactgacctttagcggttccaagattgaccgccagttcagcttcctgaacattgatcaggagctgagatataacgctctttctgctaccatgaaccggcgccaggcacaggcagaaaccatacgcgaggaacctcggcatgaatatcagcaggagaatcattccggcatcagcttgggactgttcacttcctctcccacggattatgatacggaggaagcgatacaggccaaccggcttaaaaagaagaaaaagaaaccgaaacgcaagcgaggtttcagtctataatcaattttttattaaccatcaaaattcaaattattatgaactattccgattttatttacgatttcaatctctatttgtgtgaaagattcggttacagaaacagttgttctgtcatgcataacgccaacggaatttgtgtttctgtccatgtaggcgaaatggacttatacatccgtttctgggaatacagttgcggcgttggcagcatccccgactggagcattatcattgtacgtagcaacttcaaacgaaaccagcaggaaaacttgaaagaccttgcccgcttcttcaaggagtacgccccacgatacggttacaaatacctctgtaccgaagatgacgattacaagtattatcagacccttggcctgaaacttatccacagaggctttttcagacaatataattatgggttgccgttgaaggagttggaggtataatgtagacttcttaataaagaggctgtttcaaataggaccttgaaacagtctctctattttttattgttttcagaatgttcttacttctatatgccctgaaactactatttatttcccatgccatattttccatattcatagccttttactaaattctaacatcatagaaattaggtaggtac

SEQ ID NO: 337 - DNA, 5082 bp, Butyricimonas faecihominis
atctttaattacaaagttatgaaaaaagaatcgatttttcctctttttagaggatggaaattacgagagaaggtgaagagttgcacgtgctttcgttatgctttcgctttgtgtttaatctgcatgacctccttggtatttgcccaagagaaaaaattgagttacaaatgggaggagaaatctttatcggatgtgctgaatacgctggaaaaagtcggggtgtataagttcgtgtttaattatgatgatgtcaagttgtacaaggttaccgcggaggtgaaggaaaaaagtattccggagattctggatgtcgtgttacaggacatcccgttggcgtataaggtttcgggggaatacgtgttgatacgtaaaaaggatgatgtttcaccccggtggagatggatcacggggaaagtggttgacgagaataacaccccgctaccgggtgtgactgttatgataaaggaattaaagatcggggggacgacaagcgtggatggaacctatcgtgtcgggctacccgaggaaatgaaacagtttacgattgttttttcttttgtgggcatggaaacaaaagagattgtttataaggggaaagaggtggtaaacgtggtgttgaaggaatcgacggaggtggtagatgaagttgtcgtaaccggttatcaggtgttgagagagaaaggaatggctggtgcttattccaagataaaaggggaggatttgaattttacgggaacggagacgttggaacagctattgcaaggaatgttacccggggtgatggtgatgaaccagagcgggttgacggggatgcgtcagaaagtgcgggtgagaggtacttccacgattatgggaaatgccgatcctgtgtgggtagtggatggaattattcaggaggataacgttcctttcgagatgaatcaatttacgaccattgatcaagagaacctagatatgatgaaggattttatcggaggtgcaatttcgtggttgaacccgaacgatatagaggatataactgttttgaaggatgcttcagccacggctatttacggggtaaaagcggcgaacggggtgatcgtgatcacgacgaaaaaaggggagtctggacggttgaccttgaattattccggtaatttttcgacgagcgtgagaatgaattataaaaagttggaattgatgaattcgaaacagcgagtggatttatcccgggaagcgtatctgcgtggagctaggattccaaccgagaccgtgggttacgggggattggtgttagcttacgaacgaggggagattaacggggaacaatttaactcggcagcgaagaagttggagacaatgaatacagattggtttgatatcctttatcgtactccttttagtcaaaatcataatattagtttttccggaggaaatgagaattctacttacagggcttcattcggattctccgaccagcaaaacacggccagagggaatggacaaacttcttattctgcgaacttgaacgtgacttcgaccttttggaaacaattgactatttctacgtctttatcgggaggctatacggaaacaacagcgtttgcggaaggagttgatccatttggatatgcttttaggaccagtcgtgtgattccttgttatgatggagaagagttgttttattacaaggacggcggatataattacaatatactaaatgaattggcgaattctggaaacgagaataccacgagtaatttgaatattgacgtaaatgctcgttggataataacagagaatttgacgttatcgttgttattgggaggtgcgaccagtacatccagtgcgcggatgtggttcacggaacgctcaagatacatcgccggacttcggggttatgaattcggagagtatagtgtgctggataagccattccaagattcaaaattgcctttcggaggaaagctcgttgaggtaaacaaccggaattttaattacacgatgcggggacaagtggagtatgtaaaattatccggggcccatacctttaatgtgatggccggggtggaggtcaggagtaatcaatatgacggttcttcccaaacaaattggggctatcagcccgatcgaggaatgagtgttgttgacgtgccaatagaaacaccgagcgggattatcaatgatgcgtatgcccgaacaaaaccggcaatcacgaatgagttgtctaattatttctcttattttgtttcggggggatatatgtatgataatcgttactccattaatctctcgatgcggggggatatgtctaaccgtttcggacaagatacgaaacatcgttttcaaccggtgtggtctcttggattacgttggaatgtcacggatgagcattggttacaagggcaggatatattgagtaatctcgctattacggcttctttgggttatcaggggaacgtggcggaaggggttagtccggatttgattgcccgcatggagccgatccagaaaacaacgggagagtaccagatgaaaatcgtgaaacgtccgacacccgatctaaaatgggaaaaaacgttgtcttctaatataggagttgatcttagtttctttaaaaacagaatcaatggagtttttaattattactacaagaaaacgacggatttgattacccaaagggaagtaccgttagaaaatggagttagaagtatgtatattaatagcggggatttaacaaataaaggatgggaattaagtttgagcgtggttcccgtgcggacgaagaattttatgtggagtatcggaaccagtttctcgcataataacaataaaattaagtcgcaattggagacaacgcaatcgtgggaagaggcaactgcgggtacatatcaaaaagagggttatccggtgggtagtttctgggctttccattttacaggactgaatccggagaatggcggaccgatgtttgatctttcgaatgcgaacacgaatgccgcaaaggatgatgtgacggaatacatggtttacatgggaacgattgaacctcgtactacgctgggattgaacatgatgttccggtggaaacgtttctcgttacctcttaccatataccttagccggggaaataagacattcctgacaactccttacacgaagtcttatgaaatgccgagcgagtttaacaatgcttccacggaattgctgaagcgctggcgacaacccggagatgagaagcatacaaaaataccgtcgattccggtacgggagaattgcgaggatgtgtatccgtttggtaatgataacgggatagctccttataaaatgtgggaactctcggatattcgggttgtaaatacttggttcattcgttttaataatttctcttttagttatgatttgccggaaagatggatttcgagttttgcacaaagtgtgattatctctttctcagcaacaaacccgttgcaaatcaagagtaaggatttcaagggaagagatccggaggtggccttgggaaaacagcctagaccccagaatttctctttcggaattaacgtgagtttttaatcataaatgaagacacgatgaaaacaggagtatatataatgatgtttgctctgttactgacaggatgtaatgatttcctgaaagaaactagtcaagatgaggtccgtccttccacggtgagcgatctggaacagattctggtgggagaggcttatctgagtgattataatatttataatataacggatatttttaccgacaacatggaatgttacggggtacaaaatgaaaaaatgcaagggatttttgatggattaaaatggcgttatacttgggatgatgatatgtttgcgaaagccggtggcggtaatttacctattttttgggaagttccttacaaggggatcgggggatgtaacgtggtgctggatcatttggataaaatgtatggaaagactgatttgcgggagaatctccggggggaggctctcgtgttgcgagcatggtattatttccagttggtgaacctttacgggttcccttacaattatggtgatccaaaacagaatcttggagtacctttaaaattgaattctagtgttaaagatgaaaaatttactcgtaatacagttgcggaggtttatgaacaaatcgaaaaggatcttttgaaaggatgtaaattgctaaaagatcatgaagttgaaaaggaatattttcggatcgggtatatagcaacacaagcaatattatcacgggtttatctttatatggagaattgggataaggcgttggcttacgcggactcggtgttacaagtgaaatcggctttactggatttaaatcaatttggtatacgcgatccttatgataatgttttcgagagcgtatatagccccgtgagttccgatgagatcatttgggctcgaatgtatagtggtacgagtgtcggtagtattttaggatcacaatataaatatccttttgctttatcgcaagaatttatagaagtactgggtgcctcttatgatgcctgtctggatgaaacattaaaggatttgagaggagtactgtttgtctcatgggggtatgattccaagaattacgagaccccttgttatcctcatgcagccgtgaaggatcgggatttcgggatgtatcagggaattcgcacggcagagttgtatctgaatcgtgcagaggcttgtgccagaaagtttcagaaggaaggaatagatagctatcgtgtacaggcgttgacagatttgaacgagctgaggcgtcacaggatgaataatgctttcgaatatgaaacggtggagatcacggatgcgcaattgttacttgatttttgtctgttggaacgtcgtaaggagttgagcggagagaccaatcatcgttggtttgatctgaaacgtttcgggatgacagagttgacacattctttcttcggtgatccaacggaaacgaagtcggaatataaacttgagaaggaagggtatctgttgcccatcccggaggaggcgattcgtttaaacacggacttggaacaaaataaaaggaaggttagtaaataattgaaaaaagtaaggt

SEQ ID NO: 338 - DNA, 5076 bp, Butyricimonas faecihominis
tccgtcagcttcgctgccacctcctctataaacagaggaggagctggtgactcttcccaaaaatgaagagtaactcaactctccctctgtttatagagggagtaccccgaaggggggagggagtttatttttcatattcaattctccattttcaattattaaaacggtgctttactactattcgccggattctcgaaactcttgcctccctcttggaaatcggaatccaattgtggcatttgtggagccgcatcctcgttcatccgggagccgaaagtaaccgtctttacggtagaacctcccgatgcaaacggagaaacttcttccaaatcacagaattgtgccaactcgttacggaaccgcaactgaatctcccctaccgcaccgttacgatgcttggctataataatatcggcaatccctttcaagctgtttcccatactatcctccatgatcccgtaacgttccggacggtgaatgaaaagcaccatatcggcatcctgctcgatggccccggattcacgcaagtcagacaacatcggtttcttggcatcacccgtacgctgctcaaccccacgattcaactgggacaaggcgatcaccggtatatttaattccttggcaataatcttcaactgccgcgaaatcatacttacctcctgttcccggtttccccgcatatccgccccggcagtcatcaactgcaaatagtcgataatcaacaccttgattccatatctttgttgcagacggcgacacttggccctcaactcgaatatagagagggccggggtatcatccacgtatatcggggccttgatcaaggctttaattttcgagtgtaactgttgccactcttcctcgcttaacttaccattacgtattttctcggaacccaactcggtctcgctagcaatcagacggttcactaactgcaccgaagacatctccaaagagaataatgcgatgggctggttatggttcaccgccatattccgggtcatggacaacacgaatgccgttttacccatagagggacgggcggcaataatcacgagatcggaaggctgccaaccggaagtcacttcatccaaagcgttgaacccggaaggaaccccactcaatccatctgcacgtttaccggcaatctcgattcccttgatcgcttcatcaattaaagcattaatagccgttgtctctttctttatatttccctcggcaatctcgaacacctgcttttgggccatatccaccaagtcggccacgtctgttgcctcgtcgtatgccttgttctgaatgtcggtacaaacccgaatcaattcccgctgaatatatttctgcaccacaatacgggcgtggaactcgatatgagccgcggatgccaccttcgaagtcagttgagccagatagtaatatcccccgatctcttccagttcccccaaacgtttcatctcctcgctcacggtaagaatatccaccggttcgttattcaaggaaaggttttgaattcccctgtatatcttttgatgtgcctccttataaaaacattccggtttcaagaagtcactcacggtaataaacgcatccttctccaacatcagagatcccaagatagcctcctccagatccacggcctgcggtggcattttcccgtattcggtttgtaatgacttgtaattatactccggtttcttcgccatattaaatcacttttaactctttcaatttccagaaacaacgaacagttgcccgcacgtccgccaaagcatcatgggcattctcgaatccctccccgaacagaacctggtgtaactcggataatttcggagatttgaatccctgttttccacccggcaatttacaataattcgtggacattttcatcgtacagtatttcggtttcagaaataaagaagtcatcatccgtttccgctcgaattcagcccccacaatacattcgtcaaaactgatattatgcccgatcaatgcataggccacatctatcttatccgaaaacagctccaaggtggataacaaatcttgcccttcctcttgggcttttatcgtggtaatcccgtgtacacgggatgcctccaccggaatagaaaacccttccggtttaataatatcgctacgttcctcgataatattccccttatcgtcacacataatccacgcaagctgcaccaaccggggccaattatcaacgtccgtcacgggagcattccaacgctgcggaagtcccgtcgtttccgtgtcaaaaaataaaaacatctttactatatttacgatttatgacttacgatttatgattttctttaccacgcctacacctgaaatcataaatcgtaaatccgaaattatttcgtttcgccgttttcaaaactcttgttatactggtgcatcgcccgataactcatacccatgctggagaacccaccatcgtggaacaaattctgcatggtcactttacgggtcaagtcagagaacaaggtaatacaataattcgcacactcgtcggcagaggcatttcccaacggggacatccgttctgcaaaatcaatcagagagtcaaaacctttaataccgctaccagccgtggttaccgtcggggattgtgaaatcgtgttgacacgaacccgcttttcccgtccgtaaatatacccgaaactacgggcaatagactccaacatcgctttggcatccgccatatcattatattcaaacatggtacgctgtgcagccacgtatgaaagcgccacaacagacccccattcattaatcgcatccaatttcttcgccgtctggagaaccttatggaaagaaatagccgaaatatccaatgttttttgtaaaaaatcgtaatccagattatcgtaaggacgtttttttctcacgttcaacgacatggctaccgagtgtaatataaaatcaatctttcctcccaacaattccatcgcccctttaaataaacgctccaaatcttcctcactagttgcatctgcaggaatcaatggaacattattcttctccgcgaaatccttgatctgtcccatccggatagataattcagtgttcgtcaacacgatctcggccccctcttccaaacatttctccgccactttccacgcgatggacatctcattcaacgcaccgaatattatccctttttttcctttcaataaattgtaactcataaaactgtattaaattaaaaaattctttctactattaaaattgaccgagtagcaaccgggcattctccaacgccgcatcactgacaacactcccgctgatcattccggctatttccgccacccgctcttcatctgttaaacgacggatacgggaaattgttcccacctgatcgtcttctttatataccttaaagtggtgatctcccgccgcggcaatctggggcagatgggaaatactgatcacctgcatccggcgagccatctctttcatcatctcggccatccggtgagcgatttccccggaaacccccgtgtcaatctcgtcaaagataatgaccggcaactgtttcgtgcgggacaggatgtacttcagcgacaacatcaaccgcgagatttcacccccggacgccacttttaccagttctcccggctcctgattcttgttcgccgaaaacaagaaactcacgtcatcttttcccgtcgtcgtaaaatgatccaacggggtgatcataaccttaaacacggcatgtttaatccccatgctcaccagcaatccccgcatctcttctctcaatttctcctccgatgccacacgggctttatgtagcttacccgccaacgaatccatttccgtctccacggacttgatttgtttttccaatatttcgatctgttccgcaaaggattgtattcctttcaacttcttccctaactcctcttttaaagcgatcagttcctcgactttttccaaccgatgcttgtgtagcaaatcatacatcacgttcaatcgctcgttgatcacgtcgactcttgccgggttgtattccacccgttccgccattcgttccgattcatcggcaatatcttccagttcgagaatcaccgagctcagacgctgctcgtagtcggcagcctctttcacgatcccctccaatgtcgccatccgattcttcacccctttcaaggcctgaataacgggattatccgattccgttaatacatacgtcgattcagaaaaggcagatttaatattctccgcattattcaacacggccagttcttcctccaactcctgctgttctccttctcgcagacgggcttcatccaactggttaaactggaatttcaaataatcttcctcttgctcggcctcttttgctcgctgttttagtgaagtcaattctgacaacaatccctgtcggtgggtatattttacccggtaatctttcaacaacacttgattaccgcaaaaagcatccagtatttccaattgatattccggttgcccgataagtaaggactgatgctgcgaatgcacgtcgatcaagaaactcccgaactctttcaataatttgttatttacgggagtatcattaataaacgccctcgatttaccgtctgccgtcaattctcgtctcacgaccacctcgtcatcataatccaagtcattatcagcaaaccattgctgtaaatcgtaccccacgacatcatacgtgatctcgaccacgcattttctgttcttatccataatggctgcaacatcagcccgctgtcccaacgtcagcccgatcgcacccaacaaaatggattttcccgcacctgtttccccggtaataatcgtaaatcccttctctagctcgatattcgttttatcgatcaaagcgtaatttcctatatggatgttctttatcattcctacaacctttattgcataaatcatgcgaaagtactaataattttccattttcaattttccgttttcaatttaattagtacttttgcgcaccggtttaaacatatagttctttataaaatgacaagtagaagattaattagaattaaagttttacagcttttatattcttacacgaagaaagag

SEQ ID NO: 339 - DNA, 5075 bp, Butyricimonas faecihominis
tatttattatttatttaatgattaattttccttgtcaaaatgagttgacaaggtataaattttttttcaatgtaacaattcaaaaatccattttaatccggaaaaccgatgccccgttcagacccacccacggttatacaaccgttatcccacagttttatatccccaataatttcccacaccccttatcgtcacccctccccaccttttccggtatattggcaaagggcaatgaaagggcgataaaagggtgatggaaggccccgaggagattattaccttagtaaaaggccggctttaccccggctttagactatgtcaatttatcattctcctagcactttcttgatagttcatttagaccacgaagcattcatcctgcattcatagagcattcatcttcgataaaatagatctttgataagattatacttgcaagtaaggcatatcatgtagtatattagctaaccgggaagatatattcatattattatatagggcctcgcaaccatagttcaagggtttacaaaggcataagatgtatctttccgaaaaaaaattaaaaatcgactcacccggttttcaccctcatccgtattcaaagtagaaattggatattccacaaaaaaaataaacggaacgagaagatggaaacagggacataccactatcttacacaaccgaacgaagaaatcatctcctctcctcaacccgtttctgccgtacagcttgtactgaaaaacggaaataaaatcacgctggataaccctccatcttccagagagacgttgaataacaacgctactttacacgcaaaaaaacaagaaattaactatgcaacaacaggaaaagaaacggctgaaattgatgaaatttaccacacaattatcattcccaaatacggggaaataaaaaagaatggcaaaaggctctcgaggaagagaaattaccatggaatcaatatcttgcgaccccagagctaagtaaaaacacccgtgacgactacgatctaacgagtattcctacttttctcgttattgacccggaaggcaaaatcatattctccggacacaatactatatttattaatcaagaccttcgaaggatacaaaaaactctattgtacaaaatcttaacacgaaacgtaaagccagataaaatcatttcgaataataagttgattattgattactatttctagtttggatgaccggggtacaggaacttatcactgtactccggtttctatatacaccttccccgcagccacacgaataatttttctcaatttcattcatcattatcaaaaattaataactttgtagattcttgaaagtgtttatgtgtttatgtatattttaacgaaaagatgatggaacaaaagaaaaattcttacagcatggggattatcattatcggaatcctcttctttatcttcgggttcgtcacgtggttgaacgccaccttgatcccttatcttaaaatcgcctgcgagctgcaacatgaatggcagggttacctcgtgaccttcgcgttctacattgcctattttgtcatggcattaccctcgtcttgggtattgcgaaaaacaggatacaagaacgggatgatgctcggcctccttgtgatggccgtcggcgcattactgttcatcccggctgccatgacccgcacttacgggttattcctgcttgggttattcatcatgggtacaggactatccgtgcttcagacagcctccaacccttacgtgatcgagcttggccccgccgagagtgccgcccagcgcgtgagcatcatgggtatctgtaacaaggtagccggagctatcagcccgctgatcctcggatcaatcatgctaaaagacatcgacctacttgaggcaaaattacaaacaatggatgccatacaaaaagccgcggaactcgacttactggcctccaaatccatcgtaccatacgtagtgatcatggtatcgctcgtcgtgctggccctatttgtccgtttctccccgcttccccagatcgaggacccggaagaagaagaaggcagcctacaacacggcggaaaatcaagtatattcagttttccccacctgtggatcgggattgtgaccctgttcttgtacgtgggagttgaagtaattgctattgacaccatcatcggttacgcccaatccatgaaaatggacatggacaccgcccggatattcccgacttacggtatgatcgccatgatcgtcggttacatcatcggaatcatcgccatccccaaatacatcagtcaggaaaaagcccttgcttgctgtgctgccctaggagttatcctcggaatctgtaccgtcatgttgccgagagagatctccatctggtgcctgaccttgctaagcttggcaaactcactcatgtggcccgccatcttcccgcttgcaatcttcgggttgggacgtcacacgaagaccggatcggccctactcattatgactatcgccgggggagccttacttccaatgttgtacggttcactaaccgcttctatgggacaccaaggagcctactggatgatgttgccttgctaccttttcatcctgtactttgcggtagccggacaccgggttggaatcaaacacctttataaaaaatagttacaagtttcaggtttgcaggttacaagctgatcactaacctgcaaacttgtattttgtaacctgcaatttgcaacttattaacctataactcgccattggcgaatcaaactatggacaaaataaaagctgccaaaaatcaaaaattattcgggattgccgccgttgcattcctttctatcggaattgtacacgtgggctataaagctttagaaatatcagcccatgaagagtggagtatgccatggtatttcgctatcttttctccgggattggtttacgttttccctctaattgtctgtatcattgcttatttcttcttctcgaaagaattaaagaaaaaagacgaagaataataaagaccataaaaaatggcctttattattttattccaatatcaccgtcaccgctctcgccccgtgcgccccgatgactagcgcttgttcaatatcggccgtcttcgaaggaccggatatgaaacaaccgtacccaaaatcatcaaaagcgggttgcttgtatgcttcatgcatattattcactagacgattccggtcaagtaggatcaccaaggcctcggaaataaaaaagagagccttgtaacgggtacgctggttaatccataccatcccgttctccagaatcccgaaatccccccggatcaccccgacatccgtaccgttcaattcccgcggatcatccaacgtgtcgggattcaccgtggcacatgtaacttccggtaaattcgacgcgatcgacttggcatccgggaacacgttccggattacctcgttcacgtcctgccctttttccaacaccacgcaatttcctcccacggccttcatgatcttctcgaactgtaccagcggatcagaaaatgtcaacgtctcgaacgtcatctccggtcgttccacttgatccaccgcgtgctttttcagccttgctaaaatatcttctttactacccatgttctaatttttaattttaaattccagccgcacaaagccgacactttttcaatcgtaaatcgtcattcacaaatcgtaaattaatcggctttcaatccctttttccacatctcgttaaacgtctccttcgcgaactccggaagttcccgtccgataccccacgcgtcgagagaattatacaacacgaatcgaggcatacgctcggcaacacgtccggcagcaatggcatgatagaacaaaccgggatgattcatgataaacttcatacccttcaccatcaacttcttcgacgagtcagccaaatgcaagggcgccagattctgccgccacttgtaaatctgttccgccagatcgatcttcaccggacaaacattcgaacaggaataacaaagcgaacaggctgacacgttccccgaatacttctccggcgacttcaacatccccaagttaatccccacgggtcccggtataaaataagagtaagaatatcctcccgtccggcgatacacaggacaagtgttaatacatgacccgcaacgaatacacttcaacatattcacgtgttccgtgcaggccagaatatcacttcgcccgttatccacgatcacgatatgcatctcctgcccttccaccggtttcttgtaatgggacgtatacgtcgttgaaggttgtcccgtggcagagcgggccaacaagcgcacgtacagggccagagcgtcataatccggcaccactttctcaagccccatgatcgcgatatgcaccttggggaaagaagttcccatatcagcatttccctcgttcgtacagaccacaaaagcccctgacgaggccacggcaaaattaacacccgtcatggcaatatctgcgtgcaggaatttctcccgcaaggcagcccgggccgcgtgagtcaggtaagtcggatcgctattccccggttccgtgtgcaactctttctcaaacaccttccccacctcttcccgtttcacgtgaatggcaggcaacacgatatgacttggcggtgtacccatgaactgcatgatccgttcacccaaatccgactccacggcatcgattcccctagcctccagataaggactcaacccgcactcttccgacagcatcgacttactcttcacgagattctttcccccatgtttctggataatctcgtaaacaatccggttatgttcctcggcatttttcgcccagtgaacatgaatcccgtttgccgtggcgttcttctcgaacatttcgagataatagggtaaattggcaatcgtgtgtcgtttcatattactcgccatctcccgcaacgcctcccattcgggaacatcatgggccatccggtctcgtttctcccgcacgaaaaacagcgcttgatcatgccatgctgttctctcccggtcagctataaatttcttggcagctttagcgtgtgaactcatatttatttgatttacgtt

SEQ ID NO: 340 - DNA, 5065 bp, Butyricimonas faecihominis
gcttgtaaggttcacaaagtttataaagtaccttataactttatgaaccttacgaactcttttattttatttgtccgatctccggattttcttccaaatatttttctcccatcgggaaagtatatcgcacggctccgggttctaatgtataagtcgttcccttgaatacccgagttaccgtctgtgtcggaaaatccggatcatttgccaaacgacgttgatccatccaacgtaaaccatgacacgttaattctctacgacgctcctgtaatacatttcctaaagcctctttagctgtcgctgcactcaacgaatagtcctcgcctgcaacgtaacgatactctctcaatttattcacgatattcatggattccgtcgtgtttccctcgcgagcccaacattctgcctcaattagcatcatttctggaacacaaggtcccatgttacgtccctcgttctttttccagtcataaggataataattgtccttaaaatacacccgaccggaataagtcattcctaaatcatctatcatggaacgagtaaaataaaaataacgcaaatctttttcctgatcaaaagtattcaatagattatcacttaacacaaggccagccgtggaatatgactccatggagaatgtagttacgggcattttagcaaaaataacttccttatctttcaatgtttccacgtaatttttccttctctcactttcctctgtactcgccagatcaacatagtcattcaggttttccaacgtattcttcaatttaagcgcctcttgagcgttctttttcgcctccgtgtaattacccatcaacaggtaggctcttgctcgcaacgcataaatagcacatttacccggatagaaattaaattctgccacatcgggcaaatattcgaaagcatcatccaaatctttaaaaatctgctcgtacactttttcgacagatgcacgtggcagagatccttctacacgaggggtagttaacaaggggactccttgatccgtggatgccgttgcagcattatacggaacaccatacacgttcactaacgtcaaatacgcctcggctctatgtacaagtgcctcagcccgaatttccaatttttcctcgtttgtcccgttcttactatccatcacctcatcaatcaccacgttacaattatagataacctggtacactttattcatctcatcatcattttcagactggctataaatttcgtcagcccaagtatataccgggataaatttattcgtttcatagatcgcctcttgttgagccggatcagaaatatcaatatcatccgatgccacatcatggtaagaaagcgtccaacggaaattttccgtgttattcatcaggtaacggtaattttccgtctcctccggaaccaatgatcctttagtcttgacatccacccaatcggaacaagcggagaaacaacaggaaagtcctataattatactaaatattttcttgttcatatctatcacgttttagaaattaagatttaacgagaagttataagagggtgtcggcgccatccgcaaatctctagtgttcggaataaaatcaggatctataccgacattattctttttccagatcaaacccaagtttgttgcagtaaacccgatattagcactaccaagcatgattttatttatccatttagacgggagttcataagtcaatgatatttctttcaaacggatatgatctcctttttggacatgaatatcagcacctctataccgttgaaaactattgttatccgttcccaaacggggtacatcggttttagcctcatcacctgcctctctccaacgttttgccatatcttcattaatttcataattagctccaccgtatctacttgcaggctgttgtgaaatcgtcggtttctggaaaatataccctaacttataggtgatccccacgtaaagagacaatcctttataagtgaacgtattaaaaaatccaccaaagtacttcggtgtcaatgttcccatatacaccaaatcatcattcgtaatattttccgtagattttatgatttctccatctgcattatacaccaaagcatctcctttttcatccaaaccggcccagcgagtagcccagaagttattcatattatatccctctaacatacggccacttcccgcaccattagctgcaaaactggaatacaattcataaggagaagattttacttcattcgtgttataagagaaggttaagctagccctataattaaaatcgcttttctgcacaatcgttccgttcaaagctatatccacaccttttccatccactttagccgcattccgagtaagtgtgaacagcttggaagcgttcgctccaaatatcgggtttatcgtgtactctgcgaacaaatctctcgaatacttgcgatatatctcgatagaaccggaaagacggtgattcaatactgcaaaatccaacccgaaattcaacacgcctgttttttcccagcgaatagatgggttcgctgcagaagtgatactggatgaaggcaattgggtaaatccatcattactcgtggataacgatatgttcgtgaaaggatactgactttgatctatattcccgttatacccataagtcattctaaatgtcaattgattcaaccatccgacattattcgtgataaaatcctctcgaccaatatgccatgaaaatccggttgaccacatcggagttgcccggtattttcgatcgacaccgaaattattgtaatcatcataacgcacacttcccgacaacacgtatttattcatcaaggtataggacaggtttccataataagacaggaatcgccgttgataatcagtttccggactagcatctgtcaagtaactattatatccccaaatatttatataaggattcggcaactggctaccggcaattaatgtcttctcgttataaccataatacctagccccattcgcccaatctcttgtttcacgaatctccatacctgctaatgccgtaatctgatggatttcatcaataattccatcataattaatctgcccacgaatactgtaattctgggaattaccattgttcacattcaagatacctccccatggaagattattcgttaacgtacccgtgtttgcatcataagtcgtggctaagttataaagatctctggcctcgaacgtattctcgttagcaaaagtacgattcttggtattcttcctttcaaacatgaattgcccgtctaatgacaacccttttactcccggaattggaatattcaatcccacagtcatcgcgaaagtctgctctttacgggtctcatctttgttatccagttcatccaaataattatacttccaatttttatatcccaatgcttctttttccgttacaaagtcttcattgtacgtcttatagtaatctactcgattaccattctcatctacaaattggttatatggtaataatattagacctccggatgcctgcatcatggaaagtcctaaagcattatttttaatattaaagaatgaggccctcaatcctgtggtcaaggtagcccaattcaatattttaaaattcatattggaagtcaacgtgaaacgatcaccttcttcccctttcatgttagatctctcgtttgcataagatgcagaaaggaagtaagacatctggtcagatgctccactaaaagataaattgtactgctgtgaaaaagagggttgtaataaatactttttcacgtcacgataggcctcccgactggccagttcattcaatacggcatccgcatcagcttgattaataatcccttccttcgcgtccaaaatcaatttggctgcttgtgaaatcggagctcctgccgaatacgctgaattcacgggtctcgtgatataccccttctccaccatttccttctcgtaatcaatcatttccgcagaattcataattggtaatgtattaaagcgaggagaaccggaagtcgctacattcattccgaaatttacggttgttcctcctttaccttttttccctttctttgtctcaataacaatcacgccattcgctgcacgtacgccccaaatagaggcagctgcggcatctttcaagaaagtaattgattcaacgtcgttgggatttatattcttcatttccatatccgttgggaagccatctacaacaagtagtggtcttgttgtgttcaaaagagaacttttccctcgaatattcatggaaatattagtttgttcatccacgtaaccatcggaacgatcagaaccatataaaaaagtcatatccgaattcttgacatccacgtaaacccccggaacaacaccttccaaacgattcatgatattcgggctgggacgttttgctaattccttagctgttaccacgctaaatgaaccggtggcacgctctttcggcagacgagtgtaacccgttgaaacaacgacaacctcatccaatgcctccgtggcctccttcattttgatgtttaaaggggaatcgctagtaattgccacggtttgcatctcgaaaccgaccattgagaaaagcaaagaatcaccccgtgaacaaatcgccgtgaactttccttccacgtctgacacgaatcctagcgtggttcctttgataataatattcactcccggaagaggcagaccttgttgatccgtgatcttacctgccaccgtaagtttattctcttgctgttggttagttgatttcactggactaacgaccaccgtgttatccacgatcgagaaagtaagtcctgaattttttaaacaatactccagcacggcctttacatccgcattcgtgaaatcaggattcaatcccgtaatattacctacttttgcatcattatacaaaaaagtcaactccgtttgcttttgaatttctttagcaacttggataaatgaactattcttcatcttcacagtgacattctgagccacagccgtgaatgacgaaaacaataataaaacgatcgtcattctcatcattaatcggttctttattaaccataaacc

SEQ ID NO: 341 - DNA, 5053 bp, Butyricimonas faecihominis
cattaaagtatttcattttgctaataattcatcgtttctttttgatcaatttcaatataaaagccaccattgccataggtggctttatcatgtcaaaacagcattatgacttagataaaaagtcaatagcctctttttaataatgacggggaaatacatatcaagatttcctccttttttttcatctaaactgatcaatgtttctttacctcaaccttacgagccctctccgtgtaaatatcctttttatccaccgacatgtccttcccctctccaaacgtcttcatccgctcggcaggaatacctttaccaaccaggtaagatttcaaggcctccgcacgtttcaaggataacggtaaattgattcgatccgttcccgtgtgatccgtgtaaccacgaatatcaactttcacccccgggaattccttcaatgtttccacgatacgggaaagtgctccggcgaaacgtaccgtgtcgataaccgccaggttacgtttaaagtgaattgtcggcaactcggggaaagtcttttccggggtctctaccttcaccacgttctctaccggttttttctcctccttgacaacgggtttccgctcttccttcacctccgggcgtgtctcctcttttaccgggagtaccaccgggacaacggaacgagcggcggcatacatcaagttctcctttttcttgttgttaccgatcttccaaaccaccccgaccgacaagttcgccaaccagttgtatttactggaacaacaagtggcaacaccgtcaaaattgttgttagcgatccaggcaacaccggatttcaattgcaaatcgatatgcttgccggcacgatagcgcaaggcgatgtcacctcccaatcccaagttcacgtcgttatccagcgtggaagaggtgtcaaaacgcttgtctccatccttcttgtaaagtttcggggagaacttctgcaggtaaaccgccgggcttaacaacacggtccaacggcgtagttctttcttcccgaaaaaattgttcacgttaaaatcaccgtgtaacccgatagtgaaatactttaccttggaataaaggtcattataataagcgaaaccctcttccggaatcgtcccgtaataggattcgccagtagggtaaatcttgaactctttttcccactccttggcactccctttcccctgtcccatatcggccgtcaaggacaaaccgaaagtcggggtaaactggtaacccagttggaagcctccttgtctaccgatgtaagttttatcggcagagaaggaaaccatgtcgccacggaaaatggagattcccccgttaactcccaagctccaacgggaaaaattcttgtaaatctcctttttctgtccttgggcaaacaagaaagaagtcagcactaaaaagcaaaaagataatagcaattttttcatacttaaatgtgtcgtattcaatttctgatcgtttgaagaaggggtgtctgaatcagacacccctctcttcttgtttgaaatcattttaataatttccttctggttgcaaagatttatatactccctgtattctaatcctatttctagtttttatggaattttaccggaatttccaatgtcacaactgagtgtccacgttcagtttctttatttgcatgattgcataccagcccccaaacatgtttaacacaaacttcaactttgattacaaattcgttagcaatatcctcaccatcattgatccaagttacatattcgccttcggcatccgtctcaaatttgattttcttggagttctctgtatcaagtgcagttccatcgctgaagaatccaccgattaccttgtattcgaacacactgtttacatcgtatacctgtttccagtagttacaccatccatcggttccacgtttgaacaaatcaatagttccttgatctgtcaaatctgtatcgtatacaatatggttgtatctaaagccttcttgtgctgcattctcgtcagacaaataatctgcaagcctgaaacaatctttcaaataagctttgttctcagcaagaggatatttgtcatacaacggatcgatagttttcttgacgaatctgatcggggtaatgaatgcaacttcaaattctttaattacaacttgagaacgtccatactcaggagccttagcagttcccgtataatcgtgcatatcatgagcttgagaaccaaccttgtctgtggtcttacattctggtaaattgtcagaagcttggtctttgttatacttcttctcgccattgttgcaagttccatacaatccgtcatagcattcgttgaaacttactacggcacgaatcttcactctcttactgtcttcaccaatagcattgatccattgacgtccggcatctgatttttccaattcaatcttccaaacaccattttcttgatacaatttaaggccatcggttgttccagcccaatcggaagaactattatatttgtcaaccaattcgaatgacaatgtcggttttgcaattgttgccaaatcatatgcagtttcacccgttctcggtttcaacatttgatccatcgtgtatttctccaagtcaaacatgttgttcaaaacggccaccatatcatattcgtcatccgttgtttcaacttttccgtcagcacccggagcgatccgtccgtgagcatagatcaaaccaccttcaccattagttcccggatcttgccagttcaacttggtaatttcaggagcaacagcgttcgggtaagttacaaatacagtgtattcaacatttacatccggataaacttctccactgttcgggatgtcaacatatttagccttaacaacatactctacgtgttccgtgctgaatgcggtcggtttaacaatcaaatccaattgattcaagatcgttccatcgtctgcttttctttcttccaaatcaacatcttgcttacgagtatttgcatctaaagcggcagtatgttgtttttgcaaatcaacagtaatagccggatcgaattgataatgtttgtggaattcttctctacctctagaaccagcttgttgtacacgaaggtcattgtagatgtggtccatatcaagttctacagcttgatctttatgttgtagcattactctgatcgtgtctttgattacgatcttttcagttacactctctttacccttgatttctaacttgatcaaacgagaagcaacaacattttcttctgcttctgcactagcaccatcttcaaccggagcaaccaatttcacacgcacgatcggagttcttccaatagcagcagagtgatcaccttgttcaaatcctggatattgatccggagatttcacgtaagctttagttactaattgtctttcatccgttccgtctttttccatggtagaaaccaattccaaatatctttctgtttggtcaacacctaaattattgaaagaaacagtttcgaatttcaactggtaatcatcaaatccattcgtcataaacggatattccgttccattgtcaatgaagaatgtgcggaaaagttctgtcaagtttaatcctttaccgccattatctttccggttgtcatatgcaatctcgaaagtcgtgattggagctaaactcttgtagtattcatctgcatcctcttgttttgctggagcagcttttttatcttgataagagtttacagaccggaatttatctgcatacaagttttccttgtttgcatccagtgcataatgctcaacatccgtattcacgatacgtacatctttttgtgcaatatgccaatgtttagccggtgctatttctgaataaacggtatctttcccattcaaaacagccaatgtcaaaagatcacgtttattaccttggtggttattacctaccatctcggcaaatctccacgattttgcacggaaatgcaacattcctacttctttatcttgactataactcttagctccttccagaacgccatttgccatatcatagaatctctgacccttgttaaagatcatgtttgccccgtctttcatgctacgagaaattacggtagcctcgccatgtttccacaatcctaacactttaaaagcgtcaaaagaaacagaacgaggattgaactgatacttcaactcagccttaccagcataaagaatagaattaggctctgccggaattgttcctaccgtgtattctggagctgcagcaattccatttacataattacccacaccatcagtctcgtcctgaacaattgtcgggaagaaaatcatgggagcctctcctgcagaaagagttaaaggcatgaataaaatatccgttacaatattcgttgtttttggaagtgttactttctcgtagtctccaacggtaatactgccgtcttcattcactgttcctttcggcatataaagttctacatagccttgttgttctacatagaaaattccaccgatagcaattttcggctcgataattttgccgttcaaataaagatacccgtcctgtaccgtgagtttcacgtcagttacagtcccggtacctccatcttcccctctcacatttcctaaatcaataggatcttgcccctcataagtcgcatacaagtgtccgtcttctttgatttcaaatgaaggaaccttaccatcatttccgtcatttccatcaataccgtccttaccattcacgatctcaacaacactaccatcacccaaagtaactttcaatccattagcgattttctcaacactctgtacgaattgtccctccttaattttccccaaaagttcatcaatggatgttttgtttgcagttatctgctcctgcaaatccttaatatcgtcgtcgtaatccttacaaccgatgaaagtaggacttgcaagaccacaaagtagagcacttaaaagtgccatttttgcaaaattccgttttttgttcatacttaaaaagaattatattggtaattaaaaaatatcaagtcaccccaaagcgcaacttttctttgttaaatgtctgtctaacttaattgtgtacatgtgtaaata

SEQ ID NO: 342 - DNA, 5039 bp, Butyricimonas faecihominis
attttaaacatattctgccttttgtgggaggagtgatttccggaaaccggaaggcgtatgaatatttgccagcctccgtgttcgcgtttccgcaggggaaggattttctggatattatgcggagtgccggttactcgaatgtttcgcaacagcggctgacttttggaattgccagtttgtatgtaggagagaaataaaaaggggctgaaaaaaatcagcccttttttattttaccattcaacagcatcgcggttgatcggcatggtcatgcatcttgcaccaccacctccgcggggaagttctgatccctcgatggtgatcatgtatttttcgtatttactcagatcgactttgttgctgatcacgtcgttggcacgaataatctcgaaaccggcattgttcatggcttcaacggtataattgttgcgtgcgtagcctaacactttacccggggccacgcagaagaagtttgcaccactatgccattgttctctctccatattccaagtttcgtcttctccaccgcaatacacgggttccaagtccatacccagttttttcagggcgtgtaacaatgtcttttcccggcggatgctgattagtttcccgtgttgaatcttgatgtgaaccgtctggtaattgcccggactcatgatcaagggttcgtaaaccatacatttgtccttatctaggaaagtgaacaccatatccaagtgaatgaaggattccggggaatggggtagttcctgtacaagaatatgttgtaccttgtcttcgtttcggttgataaagttatacatcaaggcgtcgatagcgcgggttgacgtgcgcataccgttaccgataaccaatatatcatcccgtgcaatctgtacgtcaccgccttcgatggttaatttacgaaggggatcagattctgtgttcaaacttaacgtcttggtgttaaatccgggcgtgaagtcaaaaatagattgcatgatgattgcctcgcgatcacgaacagcgttagccatcctaccaataagtacttcgttgtacatactcatggaggcatcgcgggtgaagaagaaattatgtaacgggcgcaagtcgtaccaatctttattcaagaatttggtcaacgtgtcgcgtttcatttcaaccccttcgatcagcaaacgggccaaatcttcggcattttcatccaacaattgatctttaattgatcctttgggggttgtttcagcaataaaaggctctatcttttcgatgcggttcaacacttccagtttgatggcatcgtcttttaaaatgtttgtcaggaggtctttgacctggtaggttttcgtgattttacctaaaacctcactgagttgcttgtattcttttcgtgcgattgataaatttagaatatcgctatagagcgccctctcagcgttctcgggagtcatgttttctacctcctcgcctggtgtatggagtatcactccattcagttttccgatttcggattgaacatttacctctacaatcttagacatatatgtgtttttttgattacgtggcaaaattacgatataaaggttgataaaccttataaatcaccactataattatgcaaaaggtaaaaataaatatgcactatttaaaaggagaaagggatacgtcacgtacccctttcaatatctcgaagagttgtccggcctctccgagctggttgcatcttaaatattttgagtatacaattcaacgttttccatcacttttgaaatagcctgtatacattagttccaatagaggaatatctcacctaaatattctttgcaaaattataatataaaattgataataacaaataaacgtcaacataattgtcggttgatagggagtattggtgtaatgctttgttttgtatttgtaatattgaaagccaccccaagataacccgggatggcttttgataacccaaacggaattttgcaaatgatgggttattttttatgtattaattttagaatctaaatccaattttcaacatcgggttagatagaaaatcaaatccgtgagtgtctgatgataggagtttcaacccgacttgtggtcggatattatataccgtgtagtcataggcaatcggtcgaatttcgatagaaataaaaagtgctttggagacgaaataatcgaatccggtgacaccggcaacccggtatccgaaagcttctccaatagattttcctagataggattcgtcatccgcttttgcttcttgtttcccgtaagagaatccaaattcccctccataacggaaaaatagtttgtcatatttggttttcacgaatctttccgctccgaggacaatggaatactttatcttatcttttgatgttacgaaattgtaatctggaatgtctccggtttcgaattttccatccgtgctgttaccgggtaaagctttgtactcgggattatgcttgaatgaaaatcctcccattgctttcagcgcccattttttcgcaaacatccatctgaattcgaaattcagtgacaactgtttatcgaaccagctggtttgtggggcggagatattgtaggtgctcaaatccggggccggggcttccataccgacaaacgagcctacacctaaatttaaagagacggatttgtcccctttctttggtgtaaaatcatcttttgtttgtgcgttggcaagcagtaccgatcctgtcatgatgatagcaattgtcaatactctttttagcatatatacaaatttagtgaatgtcagtggggaaatccccactggcattgggttttacttattcggcaagtgctgcttctgcggcatcaatagctgcttgtaaacggtcaacacgtgcttgtagttcaggttggatttctttgagttttgaaatctcgttgttgagaacattaatttctgcctggtattcttcattttgtattctgatgcaagcttctaattcttcgttcttttcttcgtcacttgcaagagcattgaattctttgatggattgctctgctttagcgatggcttcttctgctgtttttatctcttttttgtaggtctctatttgctcattgatgctttcgatgtctaaagaagttagaatttccaacaggcgattaatacgctctatttgagagcttaattcattagcttctcttattaatgtggtgtatgctgaattctctaaagccgcttctgcttcttcttttttctgttcagtcgcctcaatgttggctaccgcttcatcccaatctgctttggcttgattcatctcagccagtaacgtttcggttgttttggctgcattgtcaacgatcgtgttgaattcatcggctagtaacgttgcgatttctaattcatcaattgcttcttgtaccttaacaacaagttcaccttgattgatttccgaaacagcagcaacagcatcattgtatgctttttgtgtgattgtgacattttcttttgccttttcgtatgctgtttcattttcttcaagagctttggtggcatcagcgatatcttttttagctgttgctaatgcggcatcgtttgctgttacggcatcgcttgctttagtcagttcagctaaagcttttgcttcatttgtcttggcaacacccaataaagcttctaactcggctttcttctcaggagtaagatccggatctttcagctcgttggtatattttaccaccacgccttttttcgcatcgtaatctgtttgggcagcagtctttttattatttaattcgtttactttaccttcgtaagtagctttgtcttttgtcgctttttcaagtttcgttttttgttctttgattatttcttcaagtggtgccaaagcagcttttgcatctgttgctgctttctctagttttcctaaatttgcttttgtttcagctagttctttttcagctccttcttttgctgtagttgcctctttaatagcagttgcttgtctgtctttctcggcagcaatcttggttgtgatattttgttcgaattcaggatatcccgggaaagagaatgttttttcagttcctttgcttgttacaactgttatatcgaacggagagatcaattttttcgtgggattgctgttgtaatcctcttttgctttttcgtaagccttttctttggtaatagcctcttgtttggccgtttccactgcttgttttgcatcacaaatagctttcaataatttttttgcttcgtcagcagtattgatcatttctgccgttttggaatcaagctctttggtaagttcttcaagctttgtattaagttcattgatttttttttcaatagcggcgtctgtcagcgtttttgaggcttcaagctcagcaatagcttcttttgcagtggttactttttcttgattttcttttattatttcttggaaactagcgaggtgcacctcgaaattatcagaaatgagattcttgtaccgatttactctgtcttcgttattggcgatttcgttttgattattacgaagtttccgcagggctttgacatagtctgcatacatttgctctagttccgggttgagtttaccggcaataatggcggcatttaatttgttcaaaaaatcttgttgtttgtatgcttcctcggctttacgagtttcgtattcaagttcataaattttttgttgatattcatttgctatttctgctgcttttgcttcattccgaatcttttcagcttctgcaagtagtttttcagcttcagcttccgttttggctacgttggcttctgcgatcaaacgttcaatttcaaggcgagctgcttcatttttagcttcattctctactttcaatttttcgatttctgccagtaatttttgagcctctccttgtgcttgcagcatttcggcttgtgccttcagccattccgtttttgcggtacggatttgttcaactgtagcagattccttgtcatccacgcaggatgataataaggcgacagttatcaacacaaataataaacttatttttctcataacaccttgttttttaattaaacatttaat

SEQ ID NO: 343 - DNA, 5037 bp, Butyricimonas faecihominis
tatatatacttgtgggtttccgagattttcgttttcttaataaaaaacttgctcttaattcgtttacaaagtattggttttccatgttcagcaaaaataagtgtcttactaatgtgtcttgcaaaagtgtcttagacttgtatttttgctgcattaatttatatcccccaaatattaagtcattgaaaatcaaaaattatttccaatgtggttttttccggataaaagccttatttttgcaggtgcaaagtagggaaaacaattgaaaattgaaagttggaaattgaaaatttttcacgagagtagagtttgttatggagaaagattttacgaaacagaaagaagcttttgccgagctgttggatataatggaaaccttgagggaaaagtgtccttgggatcataaacagacgatggagtctttgcggacgttatcggtggaggaggtttatgagctgggagatgcaattctgaaaaatgatatgcaggaggtgaaaaaggagctgggagatttgcttatgcatatcgtgttttatgctttgatcgggaaggaacaggagcaatttgacatgacggatgttttgaacgagatctgtgccaagttgcgctatcgtcacccgcatatttacggggaggtgaaggtcgaggatgagaatgacgtgttgcgtaactgggagcaattgaagttgaaagagaagggccgtcataataaagttttggaaggtgtcccggatgctcttccggctttagtgaaagcataccggattcaagataaggtgaggggagtcgggttcgactggaaacagaaagaggacgtgtggcaaaaagtacgggaagagttgggtgaattggaagtcgaggtagcccggaaggatcaggagcgtatggaagaagaattcggtgatttcatgtttgccatgattaacgcggcgcgactatacggtataaatccggaagatgctttggagaaatccaacaagaaatttattcgtcgtttttcgtacgtggaaaagaaagctcacgaaacggagcgcaacctttcagatatgaccttggaggaaatggacgagtattggaacgaggcaaaagcgatggaaaaagcttgagaagattccgtgatagtcgatttgataactggaagattctataatcacttaattggaaatcactaaatcacaaaattaatcggatttaaaattagcaaggtggatttaacaggtaaatggaaatataaagaggattatggctacggggtagccgagggtgagttgttcttgaaacaagaggggaatgatttgtctgggcggattatttttacggataagcttgagggagaggaaggatatatgttgcaggaatttttagtggggaggcttgaagaacataaggtgaaattggatgccgaagagtttgatattattcattccgaacacgagatcgagtacgagttggatagttggtttggtatcttggttgatgctgatacgatcgttggggtgagtaaggatggacagggaatcgagggaaaattcacattcacgagagaaaagaattaaatgttaaaaaatagataaatttgaaaagctgacttttgtcagcttttttttgtctcggatcggttatattgcaaaagaatctaataacctaactaataaaacaataacttatgtcgaagattaattcgcatccgattctggatgttccgaaacgagataaagtggtgttcacttttaacggtaagaaaatcgaaggagaaaaaggttttaccatcgcagcagccttgcatcaggccgggtaccccgtgcatagtcacagtctggatggccggggacgttctctagcctgtggcatcgggaaatgtggggcttgtgagatgttggtggatggtaaagtccggcgtatttgcgtgacaaaagtggatggtgtgaaagaggtacgggagttcgcccagggggaaatggccgaacaacatgccgaacaccggattgatacacggaaagtacttcgtaccacggtggtgatcgtgggggccgggccagccggattagccgtgcgggaagaatttgaaaagtacggtatagataatatcgtgattgataataatgataagattggcggtcagtttaatatgcaaacccaccagttcttctttttcgagaaagaaaaacgtttcgggggtatgcgcggatttgatattgccaaaacattggcgggggagaatatggaaggtatttatctgaactctacggtttgggatatattggaggggaaacgagtggccgtgaagaacttggaaacggataccgtgtttttcgtggatgccgattatttggtcgtggccacgggggctgttccgtttatgccggctttcgaaaacgatgatttacccggggtatatacggcagctgtcgtccagaaaatgatgaataacgaacttacgctgttggggaaaaatgttctgaccgtgggagccggaaatatcggttacttgacttcttaccagttgatgcaagcgggggcccacgtgaaggcgattattgaggggatgccaaaagaaggtggtttccccgtgcaagcaaaccgggtgcgccgtttggcgataccgatcatgacgtcccacgtgctgttgaaagcgatcccgaatgctgatcacacgggaatcacgggggctgttattgccgaatgtgagaatttcaaaccgattccgggtacggaaagaatattgaatggcatagatgtcataaatatatgtacagggttgataccggacaatcaattgttgatgaaaggaaaggccgtctttggagagcattgttatgctgcgggagatgccgtgagaattggagagggaacgagtgccgtgttgcgtggaaaacagacggcgattgagatattgatggatttgggggctagggtgagttatgatgattacttggtggtttccaaagagtatattgattcacaacaacatccggttcggattctggaaacaccctgtttgccggagacggaacgtatgcacaaacggggattcgtgcaaatggattgtttgtatggttttgcatgtaatccttgttcttttgcctgccctcacggggcgataacgaaaagttcgacttctaccgtacctcacgtggattacgataaatgtatcgggtgtatggagtgtgtctatcaatgtccgggattggccattttcggttatgatttacgaaaagataacttgttcctgccgatagaatacgaggtaaaggagaaagaagtggtttacttggtgaataattatggtgagagattgggagaggggattatcgagaaagttctacacaagccgaataaaacgaatatagcccgggtgaaagccttggatgttcacggggaagatttggtgaaggtgagaggtttcgtggtgaaggagaattacccgcaaccgctagatttggaaccgttgttgaaggatcaaccgggagccacgtttatttgccattgtgatgatgttactttggacgatgttttgaaagtcgtgggtgatcgtacctttatttcgatagacgagataaaacataccactcgcttgggaatgggaccttgccgggggaaacgttgtattcctcggttgaaaacagctttacgagctaaagggattgagatcgtgggtgatgctacaccgagagcgcccctgtctaaccagttgaatctaggtgaattgtacccgccaaagcgaggtgatgagcatcgtgtggctaatcgatcggatttcaagaagatagaggtaggggcgttgattgccggaggtggtattgccggaagtgcattattccgctatatggcagattctggtttgaatcccgtgctggtgaatgcggatagaggttcctcatggagaaatatcgggggagggcgtactgcattctctttaccggagctggccgagatcgcggagcataatcatgctatatttaaagagttacagaaaatatcgaatattgattacaagacgacgcgctatattaatctggctcatgatgaacccacgttcaatgccttggacgcaagtcgtgcatggtcggatgcctatatggttgacccgaagaattttcagaaagagatttctccttatttcagcacgaaatccaaacgttacttgggggctttgattaccaatgattgctggcaggcaacccccggtaaagtggttgatttgattcgtaacatgggtatttcagccggaggacggatcgtggaagattgtaaggtgttggaagtgatgaaagaaggatcaacatacagtattttagtgttgactcatgataagaaatacgtggaattccgcacggagatattcgtgaatgccttgggggccggggccggaaagatatgcgagggattggggattcatgcgggattgtacccggtacgccatcaggcatttatcactcgtcgtttgcccatgctagggaagaacggggatagtctggatatgctgatcgatcggcaggaatataaaggattctccgctgtctatgggcaacaattagtccacacggggcaaattatcggttgtgcatccccgcgggtggatgcgttgcggacggataaaaatctgattttgaatacgaaggagtttatggagattatcagtgaattcttcgtggattggatgccggaactggctggcgtgagtatacaggccacgtggtccgggtattacacggagcctcgctatattgttgatcccgaattaggtctgtttgtcggtatgcgggggcatggtttcatgttatcgcaatacttggctaagatgtatgttgataaattaatgggccgtccggtaccggaatatttcgatcaattgaagttgaacggaccgggattgtcggaaaaagcctttaaatgatttcgagatttacgattagatgattttatgatttccaccttcctgcattcttgtagggggtggaaatgatttaatcaccgaatcataaatcataaatcacttaatttctctatctttgtcacaaaattacagaatatgat

SEQ ID NO: 344 - DNA, 5030 bp, Butyricimonas faecihominis
atcaaaaaaataaaggggcatgaaaagagtttttttctttattcaaattttatttttaatagctttgttttccgggggtaactgggatatcgaggctggtaacgtgaatatgtcttcgttgccttcacaggctcgggatcaggcgtattattcacaattggaacagagtggtaatcgttatatgaaagatcatgtgtggttaaaaaatggcgatgatcatattcaagtcgggatttcttatttcatggtatctgcaattggaaatgcaattgtttctatttctcctgcaaaagctgtagatgaaacttttgtaaagggtgaattgctagctgaaattgaaggtgcagatggttctacaaaattgtatgcgccttgtgccggagtggttaaggggatcaatcctatgattgaaaatccttacgatatgcaacctaatcaagtttgggtatataaatgccatttgaaaagagatcaattaggaaatcttatgagtgagcaagagtatgctcaagctattcaatagtgcattttctttttaatgttagaatttgtctatctccactcttcagcttacatccttttcctattttgtcgttatcctttcgttatctttccgttcctaggagcgagtggataacgacgaataacgaagagataatgacacgtatgtaagagaaggagtagagatagactattgtaagtgatcagaaagatttacaaccgatattattcccagaatattgcacacggctgagatatagctgacttaaagccgagttgagtcgtctttgttagtccgggttttcttaatgtgtattttttgacggatgttcacgtgcttaaatgggatagaataccgcttttatatttatactccttgtttgttgccaaaaagagatatgtgcagccgatcgcagaaacgccacccgtttcggaggcaatgttccagagttttgggaatcgagaggcttaattcttcgggagtggctcccatcggcatcaataggatgtcttcgtttccccatccatccagttgttttaaaagtgcctgtatttcgatgatttcgttttccccggagtaaacgaattttagttgaaagtcttttttgtttttacgggcatacgtgataaatgattgtatagccgggatattaatgcgggtcttgttgtggtggtccatatgaggtgcagggggaacagagccggataattttggggaaagactaaaaaagtcgatcatctcggcacattcttctacataaagcgtggcgttggtttcgacggtaatatgaaaatgggactctttttttaattgtaggcacaatgcccggactttatccgcttgcaagaatggttcgccacctgtgattacgatatgatctatgtttccccggttatgtcctataattcgcacgatctcttccacgggcagggagaacgaattctctactttaaaggccgcgtatgccgtgtcacattcgcaagtattcccggcaagtgttttccacgtgcaatggaggttacatccggctaaccgaataaacagggaaggtacaccgtttaattttccctcgccctgtatcgttcctgcaacgtgcaatcccgaggcgggcagttcctttagcaatttaccgtccttgtctttcgtgatcgggaaaataccatccttcgccaaatgtaacatacgtgagtttcttagtttttatcttttatcttaattccttcccaccactgatcatttttccattcttcccggattgcctcggaaaaacggatgttgtgaacattgaaattcacgagtttcaggtcttcccggaaagcctcggcatacccggttgccgtttcatgtacccgaacggaggagagttgtacgtttccttccccgtttttatgctccgtgttttgcaggattttgtcgattaggtaaaggaataacaatgcatatccttcagcagaaggagagacgggtatttcagctacccggcggttgtatttgtatacaaaagtcttcaactcgtcggattcttcctgccacaacgagtaggtatggtcgaaactatccacgagttccttcaccttatccagtagcacgaagtccatcaccatgtatccccggtccagcttgtcggacgtgataaatacttccacgatatacgaatgtccatgaatgttctcccggcaacggtgtgaagaacaattccgcacgatgtgtgccccctcgaatttgaataactttctaattaccatttatcaattttaaattttaaatcctactaatttattgattttagattttagatttccacccacgaagtccacgctttttcaatcgtaaatcgtaattcataaatcataaattaaatcggttttttcattttcaattctccatttttcattttcaattagacaacgggtcttttattcccgcctcttcaaatgctttggcccggagaaggcagctatcgcaggtaccgcagggtttttcgtcgccgcggtaacaagtccaagtgaggctgtaatcaactcctaaacgattccccagacgcacctcgtcggccttggtcatgtgcatgaagggagcgtgaagggtgattttttgttttttctcggcaccgagaacagttcctaggttaatggtttgttccatggaacggatgaattcttcccgacaatccacgtacccggagtagtcaacctcactgaccccgataaagatgtcggtgatgtcgagggcgtccgcgtaggaggccgccacggaaagaaataccatgttccgggcaggaacgtacgtgtccggaatggtggttcgatttatatccccatcgtgaatgtccatcttctcgtccgtgagggaacaaccatcccattgattcagcatgattttcacgaatttgtgttctttcactccggcggcttttgccacggcttttgccgcttttatctctttatcatgtttttgcccgtactcgaaagtgatggcgtataattcattaaatccttgctctttggcaacgtatagggctgtcgtggaatccagtcccccggataataaaacaagcgcttttttcatgatgttcttttctcctgttatttataaatacaaaggtaatatatttcgggttacgatcaacagaaaatgaagagggggataaacaagactttttgtcagtttttcgatagtcgtgaatcttgccgtgcagtattattcccgttcgtttcggtgttcttgtcattatttttacttatgtaaaactttttttgtttactattttttgtcgacagtgtgttctatttttcacctatttattttatatttgtcagatactaatatttgaaaatcgaagagtgttcatctttttaatgactaattcatatttgatatgtttggaaagaaaaagaatgaagatgacactgaaaaagtaatgaaagtcagtgctgacaacctgacaatgataacaatagggacgatagtgaaagggataatcactattgctggaggattacatctggagggaacgttagagggagacattatttgtaagggaaaagttgtgattggtccacaaggaaaagtcaagggaaatgtgaactgtgatactgcggtgttgtatggtttgttgcaaggagatattcgtgcgacgaatgagctgtacatgaaatccgggtgcatggtgaaaggtgatgtttacacgcgtaagctggaaatagagccgaatgccgggttcgatggtgtttgtaataccaccgggatgaatgcacccgtgaaggaaaaaaacaccaaaatggaaaaggtcttggtggtagaggagaagtagccctagactgtattctcttaaaaatagacttttaattttctcatggtttggatgtacgattttatgacaagtgaatggtcggttgttgaaatgtttgcataaatagctagttggcacgtgtttggtcacgtgtcaattgggggtaaattataaaacacttaaattgaaatctaaacagatagaaaatgaaacgagaatttttaacacagtttatggagcgacttattgtcgagttggaacgggagcagcgggatggtactgctcatgtttatcagagtactttgaaacggttgaagaaatttgcgaatggacgtgaagttagttttaagcaattgaccccggagtggttgtctcaattcgagcggaaactgttgtccgaccagttgaagtggaattctatttcaacgtatatgcggacgctgagatctgtttataatcaagcggttgagcgagggatagcctcttatataccccgtcttttcagccgggtgcataccgggatcgattgtcaggtgaaaagggcggtttccccggaggtaatctgtcggttgatgacagataaaaagcctttgcctgaacggctttcttttacccgggatatgtttgtcctgctgtttttgcttcgagggatgccttttgttgacttggcattcctgcgtaaatgtgatttacaggggaacgtgattgtttatcaccggcacaagacgagacgaaaactaactgttgtggtttgttcggaagcgatggccattatagagaaatacaaggacatgtatcctgattctccttatttgctccctattattcaagatcccaagcaggacgagtaccggcagtattctcggatgttgcgcctgcataactaccggttgcggcaggtgggatatttcttgaagatcagagagcaattgagtacttacgtggcacgtcatacttgggcaaccacggcgttgcgacaaaattataattccagcctgatctgtgacgcgatggggcattcatcggtaaaggtgaccgagacttatttccagcgttaccgggaagatgaggtaaaccaattgaataatgcacttgtggcctttgttttatcaaagaaggtgttgtgttgagaataatataggaattatgtgatatcaagaaggtaaatgtctgacaattagtcagaaaaaaatccgttactttgtaggtaacggaatcttttaatgagtgcaaatt

SEQ ID NO: 345 - DNA, 5028 bp, Butyricimonas faecihominis
atttaatattattctggatgatagcggtaattttaccgctgtcatcttttgctcaaggagttgattttaagtcgttgacgatgaaggaggcgcaggctgttgcggagaaagagaagaagatgatattcattgacttctacacgacgtggtgcggaccgtgtaagatgatgtcttcggaggtatttacccaagatcaggtcggcgagtattttaaccggacgtttgtgaatctgaaagtggatgcagagaagggagaaggggtggagttagctaagaagtatcaagtgaaggcttacccgacattcgtggtgttacgggcggatgggacagaggtttatcggacggcaggagcccgtccggcggatgagtttgtcgacaagattaggaaaggaattgatcccaagtggtcgcccgaaggtttgactcgtcgttacgagaagggggaacgcaccccggaattggtgaacgagtatgccctgttgcaaatggaatcgggaaacggggagatcgggggaaaggtcgtgcaagagtattttgataaactatcggataagaagagagtgaaaccggaaaacttctttctttatgatcgctacacgttgaattataaagacccgaaagcggattatatgtttgccaacaaagatcgttttatcaaggtaaacggaaaagaggttgtcgagcctttgttgtataattggctacggcaagagatgatccctttcgtgatggcgaagggagtcccggatacgggagaaaacttaaaggctttgcaggatttggaaacaaagattcagaaggccgctttggcgaatcccggttgtatgtctgaactggatgagatcgcgagggttcgttggggaggcgatttgaaggcttatttggatatttgccgggaaaaatttgcctcgctggaatccaaggatcgtttttccatattgcttagtttgggggccttgcaagaagagaatgacactataaagactttggcggccgggttactccgggatcatttggatgagtttgaaaatacgaatcggcgagtgctttacatgacgctgttgaatcttgagggaaagaaggaataccgcctgcgggcctctatagatggggtgaaaaaagggaaagtgacggtttcttacttcttgcgtggaaagtttgaacgggaagattacgagttcgataatcacatgatagatattagccttgcgggacgggacacggtggccgcgagtgtacgtttgttgtgtgaagaactagcttgtcccacggcaagagggaatgattattatcctcattttaactttatcgttgttccgggagaggctgccgtggtgaaggttaacgcggagaaagggaaggttgccgagttggaatggcaaagaggcggatcgatttctcatgattttgttcgtctgaattatgatctgttggaggcagacgagcgggattataaccaactggtgatggataatattattcgtggtggtgatattcgggattacccggacgagttccaagcgtcatgggatgcggggaaacgtcgggtcatggcatttatccgggagaatccgaatagttttatctcggtgatggagttgtgggaacattacatctggtttgacgagaacgaggccgaagatatttataaccgtttccccgcaaacttgaaagtaagtccctacgggcgggtgattgcgcagcgtctggagcggagtaaggattcgagaacggggcaatcggcaaagaatttcgtgaagaaagatatgaatgggaaaacggtgtctcttgaaaagttacggggaaagtacgtgttgctggatttctggggaagctggtgcggaccttgccgggcatcgcatcctcatttgaaagagttgtatgaaaagtacaagaaacaggtcgtttttattaacgtggcgcaagagaacgtgaaagatttaaacgaggcccggaagctttggaagacggcagttaaagaggatggaatgacgtggactcaaatattgaataacgagggacgggacgagtatgacgtggtacgtttatttaatatttcctcgtttccaacgaaggtattgattgatcccaatggtgtcgtggtatcacgaatggtcgggggaatggttgatgcgggggagattctaaagaaagtgctgggtaaataaacaaataaccccgccggaaggcggggttatttacttttatagttggttaacaacttcaacgcttttcattccggtctggatggcctcgatgttcatcgggatcatcttgtgatgacgagggggtaaagatttttgcaaacctttttccacgttgtcaagtttcacgatcggttttaccttcaagaatccaccaagaacgatcatgttgaacactttcgggtttccttgctctgcggcaatggcggttccctcgatcttgtagatattgatgtcttttctcgtcggttcgtgagtgataccgttcgggtcatagattaaggtaccacccggttttaccatgctttcgaacttgtccatagattgttggttcaagacgatagcggtatcgtatttcgttaagatcggggagctgatacgctcgtcgctcaggataacggtcacgttggcagtaccaccacgcatttcaggaccgtaagaaggcatccaagcaacttcctgatcttgcataattccggagtaagcaagaatctttcccatagaaagaactccttgtccaccgaatcctgctataatgatttcttctgtcataattttctaattgaaaattgaaaattgaaaattgaaaatgttgataaccaatcttcaatgttcatgttattgtttaaatttttctaaatttggcaataagaattgaaagctgaaaagataatattcattttcaattttcaattctgcattttcaaatgtctttgatgtctcctaacgggtatttcgggaacatgttgtctaccatccatttgttggcttctaccggggttactttccaaccggagttacatgtactaacgatttccacgaaagaagttcctttgtctttccgggtgttctcgaatgccttgcggatagcggcttttgctttacgtacgttagccggggtgtgaactgactgacgggttacgtagcaagttccatccaattgtgcaagtaattcggttaatttcatcgggaatccgttcaatttagcgtcacgtccgtaaggagtggtagcggttacctgtcccaaaagggtggtaggtgccatctgtcctccggtcataccgtagattgcgttgttgataaagattaccacgatgttttcaccacggttacaagcgtgcatgatttccccgcatccgatagatgccaagtctccatcaccttgataggtgaacacgtaacgatcgggatgaatacggctgataccggttgcaacggccggtgcacgtccgtgtgctgcctctgcccaatcaatatccaaatagttgtaagcgagtacggaacatcctaccggagaaacaccgatggttttgtcttggatacccatttcttcaatcacttccgcgataattttgtgaaccacgccatgggaacatcccggacagtagtgcatcacgttatcggtaagcacgggagttttcttgtaaacaatattctcctcttttattatatcttttaattctactgacatagcttatgctcctataatttgtttttcaagtgcttcaacgatctcttccggtgtcgggattactcctccgaaacgtccgaagtgttctaccgggatgttattggccacgttcaaacgaacgtcttctaccatttgaccggcactcatttctactgtcaagatacccttaacttgtttagacaagcgtgcaatttctttcttcgggaaaggataaagggtaatcgggcgaaggatacctactttgattcctttttcacggcatagttgtactgctttttggcaaatacgagatgctgatccataagccacaaatatgtattccgcgtcttcacattgaatttcttcgaaaagaacatcgttttcttccatcgctttgtatttctcttgaagtttgtggttgaaaacctcttgtttgtaagagtctagttccaatgaagttaccgtattgtgagaacggtgtgctttcttaccggttaaagcccagctatcagacattttgtcgatttcttcttgtgtccagcggggtttatattcgctcaattgaactttttccatcatctgtccgataacaccatcggcaaggatcatggccgggttacgatatttgaatgccaagtcaaaaccaagtcctacgaaatcgttcatttcttgaacggaagcgggagcaagtacgatcaagtggtagtctccatggccaccacctttggttgcttggaaatagtcactttgtgccggttggatggttcccaatcctggacctccacgtactacatcgatcaccaagcagggaagttctgctcctgccaagtaggttaaaccttcttgcatcaacgagataccggggctagatgatgatgtcattgcctttttaccgcaagcagcggcaccgtataccatgttgatagaggccaattcactttcggcctgcaatacgaccattcctgtttcctcccacggtttgcgtaacatgagagtctccatgacttcggattgcggggtaatagggtaaccataataagcatcacatccacaacggatagcagcttcggctaatacctcgttccctttcattaattttacttctgccattttcggtagtttttattcttattgtacattcattttgtaaacggtgatcaccgagtctgggcataccaacgcacagctggcacatccaatacatgcttccgggtttaccatctcggagtagtggtatcctttaccattcacttctttcgccaagtcaagagttttggtaggacacgcaaccacgcaaaggttacatcctttgcatttttctttgtcaacgacgatagcgcctctaaattttgccataattgaattgattatgat

SEQ ID NO: 346 - DNA, 5023 bp, Butyricimonas faecihominis
aaacaatgtttttaataactaatacatttactatgaaaacaatgaaaattttattcacgctggtagtgttcgttatgatgggtttaaccgtgagtgcccaagctaaaaaagatacaaccgttatttttaaagtaggaatacattgcccttcttgtaaggctaaactggataaagatatgcctttcgagaaaggaatcaaggattataagttgaacatgaaagattcaaccgtgttgatttctttccgtaccgacaaaaactctgttgaggcattgcgggcggctatcgagcgccatgacgtgaaagtagtgggaatgtgtgataaagacggtaagttgatgaaatgtggtaaagcacataaatgttgtaaagaaggaaataaagaagcttgcaagggaagttgcggcgagaaacataattgcagtggtacttgcgggcaaagttgtggcgagaaaaagtgtgatagcaaatgcgaccagaactgcgagtcaaaagaaagcaaatgtgaaggaaaatgtggtgacaattgctgttccaagacaggtaaaacagacgagtgctgcaagaataagaaaaagtaaggaaatattcttgaaggatacaaaaaaacggtagctttcgctaccgtttttttgtattattgatccagaataaactggttcatcttgtcgaattgtcgttccatgtcctgtaataaccttacttgaactttagcccgttgcaggttatgctcgggataggtgatcgggtaataatgatctccgtccaaataatccgtcaagaaacggacagcttgcaggtaggtcatcagcatgcatccttgcgcgagggtctttttttctttgagcgtgaaaaggtgtttggctttttccatgaatccggcggtgaaagcctcgaaataatccatgttaaaatgcacctcgtcaagattgcgggtttcctctccggctgtgttacaggacgaacgaatagcatccccgaagtcgtaatgcacgattcccggcatcacggtgtccagatcgatcacgcataacgggtgatcattgtggtcgaacaggagattattagctttcgtgtcattgtgagtgacccggagcggtagaataccctcgtctttcatccgttgtaattccaacatctcgttatcgaactttttcaaatattcgagtaattccttgcttgcctcgattcgctccggttcggctttggccaaggcttcttttaattcccgttggcggcggggaacattgtgaaaaagcgggatggtctcgatcaacaattttgcatcaaaatcggaaatccggttctcgaattccccgaacccgatacccacttgataagcgatctgggaatccgggataacatcgtagctctttgatcctttgataaagagtgatagcgtccagtagtttccctcgtaatctttgtagtaagcgtttcccttgtccgtgtagaaatacgtgatgtatttgcgggtaatgtcgctcactttgtgtcggataagccggttgcggatatgcccgcacactagttctttgtttcgcaccagtttcgggatgtccttgaacacgttaccgttgatcctttggagaatgtactcgacatcctcgtccactttcaccagataggtgtcgttaatatggccagaaccgtacggtgttgcggatataaaccgcccgctcgatacgaacgtgtcgtaaattctcttcagtttgtccatgcttagttgttttttagtgtttacccgtttttatgctatttactgtcccatgtcggtatataatccttccccgtcgaatttctgcaaggcattgttcaccagctccgtgtcctctttgtatgtcacgccgaaccatttggcgctggtgtttaagaccttcactttcacggccttttgcttgataagttcgtctaccacgaaaggtatgtaaatctctgccttgggattttcgctgttcttgtggtagaactcgatgaattgcttctcgatctccccgaaaagcatgggcgagaatccccagaaattcatggaaaccacgtcatcctcgtgcaaaactactcccgagttcaggtctttaattacgtcaccttcccgaccgatcttcgtgcattcggtgatactggttaggaaattgtcctcgtcaaccgtgcatattcctctggataccgtcccgttctcggatagcgtggctgccaaccggtagccggccaagctgaagcatctctcgtcggagttgctggctacgaaatcgtgcatcttcacgaaagcatcccgtccgtaaaagtcatcggcgttgatcgcgataaacggttcgtgtatatggtcttttgcggcccagatggcgtgagccgttccccaaggtttttcccgctggatcgggggtaggttaccgggcagttgatccatttcttgaaaacagtacacggtttcaaccaagctttctgcatattttcccacggcctctttaaattcgttctcgaaactccggcggatgatgaaaacaatcttgtcaaaccccgcgtgtacggcgtcatagattgaataatgcaacaatgttttcttgtgaggtccgagtaatgccagttgtttcaagctaccgaaccgggaacccatccctgctgccatgatgagcaaggtcgtcttattcttcgtcgtttccatgtttttatatttaatctttttacttgtattaccttctttcgggcaaagctaataaaaactgcggaaagaatctagcaagtcgtgttttgttttatttcaggtgaaaatcttggttgtttttatgcctcgtcctcttctgaaaatggatccagtagtgggttttgctcctctttagccggaagggcctcgaccgagcggagttgtcgctgtatggcccgggttcgtttgcccatgacctcttccagttggttgttagcggtttggagatttttttgggctttctccagaagtcccccgaatttctcgaattcggccttcacgccaccaagaatatgccacacctcgctgctgcgtttttggatggccagcgtgcggaatcccatttgcaggctgttcagtatcgctgccagtgtggtaggccccgtgacaatcacgtggtattcctgctgtaattgttccagcaaggctgcccggcgggtaacctctccgtatatgctctcgaaaggcaggaacatgatcccgaagtccgtggtatgtggaggggctaggtatttgtcccggatgtcctttgccataccgcgaatggtctgttcgagtacgcgggaagtggtttccacccgttgcaagtctccggactcgtaggcgtcaaggagttgctcgtaaacatccttcgggaacttggcatcgatgggtaggtagaccgattcgtctccttctgcccgtccgggaagtttcacggcgaactcgaccagtttgtccgatccgggtttagtcttcacgtttacatcgtattgatccggggctagaatctgttccagtaacatggagagttgtacttccccgatcgttccccgtattttcacgttgctaagcactcgttttagcccaccgacatcttgcgccagtgtctgcatctcccctaagcctttctgcacgttttccagttgcttgctgacgagttcgaacgattgtccgatgcgttcgtgcagggtcttttgtaacttttcatccacggtggctcgcatctcttccagtttcttttccgtgttttgcaagagctcctgctggcggagtgatagttccccgaacttttcccgttgcaggcgattgaataattccatgctttcggcaaaacttttttggaaagcctgtatggcggagttggtctgggtggtgatattcttcagggtttcccgatgttccgtccggaaatggttgagggtagaggcgagttcttcccggtctttgcgggaacggttttcgtcgttttctcggttatagcgggattcgtcccggatcactttttcgagatccgagatagatcgtgatacatcccgtgcggtgttgtccttgcgggaacgaacgtgtaatccaatgaggataatgttgagaatgagaagtaaaacgcaggatataagtataaataattccatatttctgaaccttttgttgttcaaaaatatggaaaataactcagagtttagtcaactcttctcgaatttgttcctgcccgtgcgggacgaagatgagagcggtggtgtcgtaccctcttcgccgcgcccgttgcatcaagtcatccaattttttaggcgggagtttcggtgtgcggctcacgatccagagatgatcgcattgggaacttccgatgagagccgcgctgtaatctttctcgacttccagaatgtggtagtccgtgttgaagatcaagaaaaaggtgacttttagaacgcccggttgcgtcgtgtccgggatatgcacgtgtcccacgatctcttttttctctccccggagactgtcttggtaacctcgcccgataacctcgatgctcccgccgggtttgatggtgtactcggttgttaccccgaccaagcctcgctcgaagggatggtcaaagcgtgcgatttcataccataggccgacgtacttttttagatccagtgtgtctatggcccggttatcgacgatcttgtcggattgtgctgttgctgccatgatattgcatccgacgagcaatacggctaataagaaggacttcatactacgagttgataattaggtgtttagtttctcgtaatacgaggaatcggcatctgatgttcgtttataagatttataaagtctgtaaagttcataacgtctttttggggagtgctggggcagtggaaagtgaggtctgtgtttaatagggcgtttatctttgttgcctctcaggtaaataagaaatttgttttgattaattgatgactacctgattataaccggaagtaatatttttattaaagtatataaatactttatgaaccttattatatataaggttcatataaggtatctataaggtatctataaggttcatgacgg

SEQ ID NO: 347 - DNA, 5013 bp, Butyricimonas faecihominis
atgtatatttgtaccttaattagaaattagtttttaaagaatgagtggagcagaaaaattagtggaacaaattattaaaacgctgaacgaaaataaagctgttgatattgtaaaaattgatttgagaagaattgagaactgtttctgtagttttttcgtaatatgtcatggaacttccaacacgcacgtggccagtcttacagactttgtctacgacgaagtcaacgagaaattgggagaaaaaccattgcacgtggaaggagaacaacaagcccagtgggtggtgttggattacggaaatgtggttgtacatatatttcaaaaagaacaacgagattattatcaacttgaagatttttgggctgacgcggaaataacgaatgtagaagaaaattaaaattaaatatggcagaaaataacaaaaaggatagtttcaacttcccccctgtcggtgggaaaaacaataaaggcccgaaattcggtggctactggtcgtttatcatcattgccgctttcattatcgggattcaatttttcagcatgccttcgaatcctgaacggatctcgtggcagaagtttaaaacagaccttttagcgaaaggtgaggtaaaggatatttacatcgtcagaaatggcggtaaagccgaaatcactctgaaaccggagaaagtggaaacccacagcgaccttgtagcaaaaggatttaaccagaaaagtataggtccgcaatactacgtacctttcggaactctggagcaatttgaaaagaatttacaggatgcacagaaggagtacccggaagaggcatccgacgtgttcattgactataaagacgatttcaactggtggggagaagtcattacactattcctgcccatcgccatattcgtgggaatctggatattcttcatgcgccgcatgagcaagggagccggcggaggtggtggcggtggcggcattttcaatgtcgggaaatccaaagcgaaattgtttgacaaagaatccaacataaaaattaccttcaaagatgttgccgggttagccgaggccaaacaagaggtggaagagattgtgtctttcctcaaatccccggataaatacaccaagctgggaggtaaaattccgaagggagccttgctggttggccctccgggaaccggtaaaactttgatggcaaaagccatggcaggagaggcaaacgtaccgttcttctccatgtcgggatcggacttcgtggagatgttcgtcggtgtgggagcttcccgcgtacgcgacttgttcaaacaggccaaagaaaaagccccctgtatcatctttattgacgagatcgacgctatcggtcgggccagagggaaaaacccgaacatgggagccaatgatgaacgcgaaaacacgctgaaccagttattgaccgaaatggacggtttcgaaaccaattcgggtgtgatcatactggcagccacgaaccgggcagacatcttggatagcgctttgttgcgtgccggacgtttcgaccgccagatatacgtggaccttccggaattaaaagaccgggaagagattttcaaagttcacttgaaaccgttgaaactcgccgaagatattgactatgcctttttggcaaaacaaaccccgggattctccggtgcggacatcgccaacgtggcaaacgaggccgcgctgatcgctgcccggaaaaataaatcggccgtggaaaaacaggatttcttggattcaatcgatcgtatcgtgggcggacttgaaaaccgtagtaaagtcatcaaaccgagcgaaaagaaagcgattgcttatcacgaagccggacatgccaccgtgtcgtggttattgcaacacgcacacccacttttaaaagtgaccatcgtgccgcgaggaaaagccttgggtgccgcttggtacttgccgcaggaacgccagattaccacgaaagaccaattactggatcagatgtgttccgtgctgggtggacgggccgccgaagaaatcgtgttcggggaaatatccacgggtgcgcaaaatgacctcgaacgtgccacgaaacaggcttacgccatggtatccatctacggaatgagtgacaaggtgggaatgttgagttattatgactccacgggccagagcgatttcagctttaccaagccctattccgagaagactgcagaattgattgatgccgaggtaaaagatatggtttcagccgcttacgagcgagccaaacagttattgagcgatcacagggaacaacaccgtcaggtggcggaattgctgatcgaacgtgaagttatctttagtgatgacttggaaaatattctcgggaaacgtccgtggacagaagaagaggagacacaacagccggaagaattgtaacggcaaggcggaaggattcccgacaggaaaaaacagtataaacttaaaaccgacgactatggaaaattgggtatctgttttcacaacaacgagcgaactcgaagcagggatcgtgaaagatctactggacgaggcgggaatcccagccgtgattttgaatcaaaaagattcttcttaccaaacctttggtgacatcagcgtgatggtcagccgggatgaccaagaagaagccaagaaagttattaaagactattatgatcgtgagtaattttttaaaacgagcaatcagcggcttgctgtttgtcatagtactaacagggtgtattttcatacaccccatttgtttttatatcctgttctttatcatcaacattcttggcctgatggaattcagccggatggcgaaacacatgaacatccacgtgaacctgttcttctgcatcctttgcggtagcattcttttcaccgttggatttttgcataattacatcaattacaaggatggctatctctattttttcctgttgaccttcatcatgtctatctgtgaactctatcggaaaaagggaaacgggttccagaacatagccttctcctactacgccttgttatacatcagtttacctttcacgttgctaatatacctaccctacatgacctcggggaaatggatgccggaaatcatctttttcccgttcttgctcgtgtgggttaacgataccttcgcttacctctccggctcattattcgggaaacataaacttttccccagaatatcgcccaagaaatcatgggaaggagccattggcgggggactaatgaccattatcgtcggtttgtgcgtgtcgccctatatcgaggggtacacgatccgggacacggccattatttcgtgtatcgtggctgttttcgggatatacggggatttactggaatccctgtttaaacgtagcatcgagatcaaggattccggcaacatactaccgggccacgggggcatcttggacagattcgatgcaatcatattcacaattcccgctatttttgtttatatggaattcatgtattaactttgcccgctgttttactaacgtaacgaaattaatatgaagatacataaagcaggtcatatattattgttcaaagcattcgtactctttgctttcatcaatgtactcgtgtatgccttcatccctaatatcattgttttccgggcggtactgatcgtcagcggaattttgtacctcttgatggtaaactttttccgtttccccaacaggcacattgtcgtgaaggataacacgatcctcgcccctgccgacgggaaaatcgtggtcgtggaagaaaccttcgaacctgaatacctgaaaaaacaatgtattcaggtttccattttcatgaacatcttcaatgttcatattaactggtttcctatcaacggaataatcaaatttttcaaatatcaccaaggaagatacatggcggcttacctgcccaagtcttccacggaaaacgaaagaacaaccattgctattgaggcaaccaacggacaagaaatcgtgatgcgacagattgccggagccatggctaaacgtattgtttcatacgctccggtcgggggaaaagcccgccagaacgaacatgccggattcattaaattcggttcccgggtagatttgtacctaccgttaggaactaaaattgacgtgaaactcggccaaaaagtaacggggtcgcaaacccttatcggaacatttcaagaacccgaatccaagtaatcataccgaggattcgtaaatcattattactatgtctgttcaaaagaaagtaaaaagagtaaccacccacgtgttatcagaaatgaaactcaagggggaaaagataagtatgttaacggcctacgatttctcgatggcccaaattattgacaatgccgggatcgacgtgattctagtgggagactctgcctctaacgtgatggccggaaacgaaacgaccctgccgatcacgctggatcaaatgatctatcacggggcatccgtggtgagaggtgtagatcgtgcgctggttgtcgtggatctacctttcggtagctaccaaggaaacagtaaagaggcactttgctcggcaatccgtatcatgaaggaaacgagtgccgacgccgtgaaactggaaggtggacgagaagtcgttgaatccgtaacacgtatcctgtcagccggaatcccggttatgggacacctcggactgaccccgcaaagtatccataaattcggtacttacgtggtacgcgcccaagaagatgcggaggctaaaaagctgatcgaagatgcccaccttttggaagaggccggatgttttgccatcgtgctggaaaagattccggcaaaactggctgcccaagtcgccaaagaactaaccatcccgatcatcggaatcggcgccgggggtggcgttgacggacaggttctcgtgattcacgatatgctgggaatcaatcaggaattttctccccgtttcttacgtcgttaccacaacttatatgctgaaatgacaggagccgtgggtaattacatcaacgatgtaaaaagcggtaacttcccgaacgagagagaacaatattaaaat

SEQ ID NO: 348 - DNA, 5001 bp, Butyricimonas faecihominis
atattcctaacagtaatatatgtaagtttattttcatagtttttcgttttattaattcaatgccggattactttctttgtgagatttcatgatgggtaacacccatttagaacttgctgttccaatttcaacggaatattcatctccgggagaggttgattcgtcaacactatgagagaaggatttcatcccgtagcgtcgcaaatcaaaccagcgcataccttcgaaacaaaattcccggcgacgttcttctctacacgtttcgattaaattctcggcattattgttgaacgtgctgctggtccaagcttgagagctgtaatttttaatgcgtttctctcttatcgagtttaaatcggatactgcttttgcaaagtattcattttgtccggccttcgccatctgtgcataagcctctgcccggttcaggtaaacttcactcagacgtaagcatgctccaaattcaagttgattagaaaatttggatagctttttttgatctctttcttcattgtatgggcatagataaccattccaacgttggtcgtcatctgcaaagcaatttcgtaacgcatcagatgccataaagcattcggtggtgtattctgctttcacgatttgatattcattctcgcttgcataatagaatatgatctcggagttatttaacgtgaatgggtacggaaatcccccaaggctaatagctgccggataatctatgggagtcatgtcatataaggtaaggttacttccgggtgtagagaatacgctggttgcatgttctgctgctttttcccagttttccatgaaaagatagtagcggcttgccaataaatgtgcggcgttcatcccgatacggaatttagaacccgtggcgttgatttcggtcaataggctgattcctttttccacgtccgagattattgctgcataaacttcggctaccgtgctacgaggaacggaattctggtcaatggaactacttaatttcaatgggattcccgctgcttttccttgtggggcattgggagcgttgtaaggataagcatagaggttgataaggttgaaataatggaacgaacgtaatatgcgagcttctccctctactctttttttcgtttcgctttctccgcttacctcgttgatcatgtctaaaacaacattgcatcccgcgatcattttgtaaagagtcgcgtaggaatccacttcgatacttgtaatgccggtagtcgggttaggtaggttattgaagtcgtcgaacatattttcattgttctccacggaacgtccgccccataaatacaggggactgtatttcgtcacgaccggtttggcgttattggatgtgatgtattgggttacgtcgtcatccagtaaattcaagtagggcattagcgtaaagtcccgtctgggatagccttcgtatgccagtagctgatccaagtcttcgatcgtggaaggaatgacttcgtcttgagaagattcttcgagaaagtcactacaagaccatagtccaataatggctaaaagtagaatgcttttttgtattatatttttcatggtaattgaatttttcagattagaaacccaaacttatacttagcgagaatttgcgctgacgatcaataaccggaagaaccgtggtcgcactggtacttaaagtttccggatcttgtttacccagtcctttacttttgataataaacggatcggtaacggttagtgcgaacgttaagtttgtaagtcttaattgatccagtatatctttcggtaaagcatacgtcagggaaatattattacatctcagatgattggcctttaccacccgtaaatcagataggttatacatctgataacgataaatttcacctttgtcgcttaaactgagtgagttatccgggagatagtctgctaaattctcatccgaagataatatggccggtatattcgtgtatttctcatcacccggttgtctccaacgtttattgagttctgtgcttgcatttttttccggatcggggatacgtagctgtccgatgcctccgctggtagcctgacttctcatgaaaggattcagacgtttatgatgtcctagctggaagttaaacgtggcagataacgtgaattgctggtaccggaagttcgtggataatccaccgctgaacacaggatcttttaccccgctgtaaaccatgtaatcaagtagggtacccgattcaacccttgttttagttccgggtgtttggtcgatgattgcaaattgagggactcctttgtccgataaaccgatatacgggaatgaccagaaactgtttaaagcaaagccttcgataatgacactaccatcggtaattttttcaagcgtggcgttgtcctcgttatcttttacctcgttacggttaaagccggaagttgcgctgatactccatctgatgttttttgtctgcacggggataacggtcaacgatacgtcgtaacctttattgatgatggaaccgttattaattgccatgtttgaagttccgttctccacgggtatattcacgtaggtgatagcgtcaaccgtttttttgtagtagtagtcaatgcttccatatatccggttgtttagaatggagagttcgataccgccattgaaactgttggtcttttcccatttcaggtctttgtttgggaggttcttgatcgacaggaattgatcgcccgtcaatacgtccggtgcaatgttgaaattggcgatcagatagggactgatatccggggcttttccttgagatccgtaggatgctttcaacgtcaagttggataaccatccaaactggcgcatgaagttctcttcacttacattccatctgattccggctgatagaacggggttaaagcgattgttcgtgttctgcccgaatttgttggatgcgtcttgtctgaaactgaaagataacgtgtacttgctagcataagagtatcccagtgttgcatagaaagacatgtagttttcaatctgatccgtgagagtgattgagtggcggtcttgatatgcaggtacattcgctgtttctctatattgacaatcaggataaatgcttaaaatgtaatctctgttggcttgttgactgtaattgtagtccacgcttttacctctgttaggcatgtagccgtattcaacgccactctgtccgatgtaactgtttcctcgaacttcatgtcccaaggcaacattgagggcatggttcccttcttcatcaagtatttttccgtaattcagttggttacgcaccgtgtagctttgttggtttgttgaattgtaattcaaaataccaccataaggtaacacggaggccaaggttaaccatgagtcggattctccggttacaagttctccataattggctccccggatttttgaaactgcataagaatggtcatctgcccaaacgttagcctctgaactgtttctggtaaatgcagttgttaattcatacttgatttccggtgtaatattccagatcaagttacctgtaatttggaatttcgtattcttattctcgtttccggtatgttctaattcattcaagaaattgtagcgaatatctcttttaattgcagtgccattatccaattcgaagtaggcttttgattcattgatggtataccattcgtccggggctaatatccggctggtattcagagcataatcttccgggttgactcccgtgtagtaagcgttcgtctcggattgactggcagagaattgaaatttagtacgtaaattatcccgtagttttgcatccacactgaagttgaccgttttattgctttggtcatttcccttgtagctactcaatgatttgttgaaacccacggaaccgtaaaaattgagcttgtcgtttccaccgcttaggcttaatgaataattctgactgacagcgttacgggcgaggattttgaaccagtccgtgttttgtttttccatgcgggttactttttcattgaactcgtccatggaaatctccttattcatcagttggagataagctccttcgtaacctacattttgagggaattggctaaagggtactccggactccacgatttctttggataaagcaatacgatcggcagaattcatccggtccgtttgtccatacgttcttctaggagtcagggaaatatccgttctgaaattaacattaattcttccgttcgtgttagaacctcttttcgtggtgattacgataaccccgttggcggcctttaccccgtaaatagctgtggccgacgcgtccttcaagaacgtgatactttcaatgtcgtccgggttaaggccggaaatactactcccggaaatacttgccattgagctactgaggtctccggaactaagaatgtcatttaactgtgctccggcaaaggggagagggtcttcttgaatgataccgtcaataacccataccggggaggcattcccgatcaccgtggaagttccgcgcactctcacttgaggggatgttccgatcattcccgagggaatcgtgatacttactccggggacaactccttgaagggcagcatcaatactggtcactccggcaacacgtatatcatcgcctttcaccgtgaaagtcgaaccgacaacttcatgttttttcagcgtctggtacccggtaacgactacttcttccaaagccttggtatcttctttcaaggtaattttgtaaggaacctgtttggcatttacgactacttcctgtgatttcattcccacgaatgaaaagatgagcgtgctaccttccggtaccgtgatcataaattttccgtcattgtcggaaagtactcccacgcctttttgccctttcacggtaacggtaacagaagggagcgtgataccggtttcgtcatatattgttcccgttacttttatttctttattctgtgcgaacacgttgttcgataaggcgagcaacaagataaataatatctgggttacggatagttttatat

SEQ ID NO: 349 - DNA, 4987 bp, Butyricimonas faecihominis
ggtatgttgaaaaaaactcaaaatattgattatttgatagaaggtaaaaagattgtaataaaagaagtccgctaagtttttaaggacttaccggactattgtaattttaaaactcgcctcggattggcatttgatgcgagcattaagtaaaaattaaacaaatgtatgaaaaaagatgaattaattctccatccatggcgatggcgtggaaaaaaaatgctagtgatgaaacttgttatgcttatggtgttgttgccggtgtttgcgtttgcaataccgacgtatagtcagaaacaaattaagatggaggttcaagatgtaagcttggaacaggtgttaaaagagttacatgcacaatctgggtattatattttgtataataaacaggatgtacaaggggtgaaaaatgtgagtttgaaagtaagtgaagcctcggtagaagatgtgttgaagttgtgtttacgaaatacatctttacaatatgagattgaagatcagacaatcctgatctctgtcaagaaggttaataatgaaccggagaagaaggaaagcgtggttcttaaaggagtggtgaaagattcaaaaggtggcgttttacctggggtgacagttatgattaaagggacgagtgtagggactgcgaccgatatggatggaaattattccatgaatattctaaaacaggatactgttactctgatattttcgtttgtgggaatgaaaacgaaggaggtgaaatgggctggtcaatcagaacttaacatcacgctggaagatgaggtaagtgagatggatgaggtggtcgtgactggtatttttcagcgtaaaaaagagagttttacgggttccactgctacattcaagaaagaagagttgaagatggttggaacacaaaatttgattcagagtttgaagacactagatccttctttcgtgattatggagaataatgattatggttctgaccctaatcgcttaccggatatcgaaattcgtggtaaaagtagtgttgtaggattgaaagaacaatatgatactgatccgaatcagccattgtttatccttgatggtttcgagactgatttgcaaacggtggtaaatttgaatatggaccgtgtgcaatctgtaacaatattgaaagatgctgcgtccacggctttgtatggttcgaaagctgcaaatggcgttgttgtgattgagactaaacagcctgaaccaggaacatttcgagtgtcatacaatggtaatttttctttgtctattcccgatttgtcggattataatttgatgaatgcacgtgagaaattggaatttgaacagaaagctggtttttacaaatcggattatacatatgatgcccaagaacaattatttctggatagtttgtataatcttcatcgtgcgaatgtagcaagaggagttaatacttattggttaagtgaaccgttacgagtggcattggtgcataaacacaatatttatgcagaaggaggtgacaatgcagtacgttatggtttgggtgttacctataatggaacagacggagtgatgaaaaattcgggaaatgacgttatcggtatgaattttgagttgaattatcgaaaaggaaaattccgttttttcaacaagatgtcatttgattatacgaaaaaagaaaatccgacggtaaatttttcagagtatgcaaaagcaaatccttattttgaaaaatatgacgaaaatggcaatgttacccgttatttagaagaatattatactgttaatcgacagcactatacggttgagaatccattgtacaatgcaagtctgaacagttatgatcgtcaaaaaggtatgagctttatcaataaatttaatgcagaataccgtccagtggaagaagtgatggtacgagggcgtatcagtttggagaaaaaatcggaaaaggctgagtattttctatcccctgagcatacttcttttgatggtgtggctcaaacccaacgggggagttataaatcgacggattacgatacttggatctatgatggggagttaactgtgacttatggtaaattgttcaatgacgtacatcaattaaatgctgtattgggggcgaacttccgttcgtctgagttgaagacagaggctttcgaggcggtgggctttcctgtaggtgattttacccgtccgtcttttgccaccagtttcccgaatggcggtaaaccggactacacggaaacggttacccgctccaacagttggtatttgaatatggggtatgctttcgacaaccgctatttgtttgatgcaaatattcgtttagatggagcttcggtttttgggagtaataaacgttataccgaaacgtggtcggtaggggtggcatggaatattcacaacgaaagcttcttgcaaaatgctgaatggatgaccttattgaaagtgagggcatcaatcggtaatcctggtaatcaaaattttgatgcttatcaatcgtataccacgtattcttttaataattggagttctaataactttggaacaagtttattggtagatgcatttggtaatcccgacttgaaatggcaaaaaacattagacatgaatgtgggtgctgatattgctttgttgaggaatcgtttcaatataaacttcgactattatcagaaaagaaccgacccattgttggctgtaatcggtttgccttcttcggttggtacaaaaacgatagctacaaatatcggagagcaatggaacacggggtacagtgctacggttaaatattcgccgatttaccgcccggaggaaggtatcaactggaatctgagtttgaatttccgtcaccaaaagtctgaataccggaatattggcaatagcttgagtcagtttaatgcgcaaaatgaaaatacaagcttagtgcgttattacgatggcggtagtcctactgcattgtgggcagtacgctctttgggaatagacccagcgagtggtaaagaagtatttttgaaaaaagatggtacatatacttatacgtatgagacaaaagatgaggtccaagtaggagatacagaacctgatttggaaggagttattggtactacgctgtattataaaggattttccttctctgcacatctacgctatagtttgggaggtgatgtcttcaacgaggcattgtatactaaagtggaaaatatttccgaagaaaacttgaaatacaaccaagataagcgtgcattgtataaccgttgggaaaagcccggacaacacgcccggttcaagggaatctctctaaccgagacaacacaaatgtcttcgcgttttgtgcagcgttctaatttcctgaaaggggagtctttttcagccggttatgatttcccaaaagaatggattgaaaaagccggtttttcagccttgcgtttgcaggtgaatatgaatgatgtgttccggatatcaagtgtgaaagaggaacgaggtatcgaatatccttttgcgcgtatggtatcggcatctgtatctgtaactttttaaaatcggatgattatgaagtttgataaatatattaaaatcggtgttttgggtatcgctttgtggtcgcttactggatgtacggattggttggatgtacaaccggtggatcaggtggcggaggaacaaatgtttacttcagaagaaggatttcgtcaagggttgaatggcgtgtatgtcgaattgtgtagttccaatctgtatggaggagacctgcaggtaggtactgtggaagtattggcgcagcgttataaatttgccaattatggtaccatgcagaatttgaatagtttgggacaatttgattacacgaccgattactcgaaatctaatttcgccggtatttgggaaaaaggatatgctctgattgccaacgtgaatacattattaaaaaatgccgatgagaaaaagaatttgttcacgggtgatcaatataattggattacaggtgaggcttatgcgttgcgtgccatgttgcatttcgatttattccgcttgtttggtcctgtttacaaaactaacaaagagggacgtgccattccttataacaaagaatttgtattgtccggtacggatttgttgccagcttcggaagtgttggaatatgttattgatgatttaaaggaagctgaaaggcgtctagctaatgatcccattattgaacaagggccgctattggaggaaggtgcaacggagggagagaatttctggcattatcggacatttcgtttgaactattatgcggtgaaagctcttcaggcacgagtgtatttgtatgcagagatgtttagtgaagcattggcagcagctcgtgaagttgtagcagtgcaggaacaatatttcccctttaccacaaaatctcaagtgaccgatggccagaaacctgataggatattttcatcggaattggtatttgctttacaatatccgaaccgtgataaaatctttaccgattatttcactccggatttgaaagatgaccaaatgtggcttactccttctacctatttggaaaaaattttcggtacgctagcgttgaatgattggcgttatgagtctaattggaaagtagcatcaggacacaccaatagatgtttctataaatattctgatttggaaaccgatgcttattacgccgatttactaccgatgattcgtatgtcagagatgtattatatcattgctgagacagccgaaaatgaaactgatgcattggaaagtatcaatcttgtactggataatcgtggagttgaattgttgacctccgcttcccagctggagagtacattgctgaacgaatatcaaaaggagttttggggagaaggacagctgtttttttattacaaacggatgaataggtcaagtatcctttcagcgttctccggtggtaatgtggaaatgaatgatactaaatatgttttgcctttgccgcaaagtgaaacggattttagatgacttaaaacgtaatgtattatga

SEQ ID NO: 350 - DNA, 4985 bp, Butyricimonas faecihominis
gtttatattcttgtttcatagatggttataataattgtttcttcatgtggcataccattggtatcacaagggcaaagattattgaattaatatatgaaattatggaacaggtattatcatttattttcttgtgtctgacaggcgtcgtctgttactggtttttctttaagtgtattgattggtttgagaagatttaaaggaggaaaaaaatgtttacggtattatttatttttagtgtggtgatgttcgggtacatgatgtatgtactggttcggcccgagaaattttagataaaataagaaatgaatacagagattctaggtagtgtattgcaggtcgtcctgttggtggtactggcttacccgttgggacgttacattgcaaaagtgtacaaaggggagcgtgtatggacggattttatggctcccgtggagagatggatgtttaaattaagcggtataaacccggaagagtcaatgaactggaagaaattcttggtggcattgttgacgatcaacctgttttggttcttctggggaatgttccttctggtcttccaagggcatctgccgttgaacccggatgggaatgtgggacaaacacccgatcaggcgttcaacacctgtatcagtttcatggtaaactgtaatttgcagcattatagcggtgaatcgggattgacttatttcacccagttgttcgtgatcatgttgtttcagtttatcactgccgccacgggtatggctgcgttggccgggatattccgggcgatggctgccaaaacgacacgggatttcggtaacttctgggcgttgctcgtgaagagttgtacccgaatcttgttaccgttagctttggttgttggttttatcttgatcatagaaggtgttccgatgggctttgacgggaaaatggaagtgaccacgttggagggacagacccagatgatttcacagggaccgacggctgccatcgtgccgatcaagcagttaggaacgaatggcggtggttatttcggggtgaattcttcccatcctttggagaatccgactttcctgacgaacatgacggaatgttggtcgatattaattatcccgatggcgatggtgttcgcgctgggattctacttgaaacgtaaaaagttagcatacacgatcttcggagtgatgttgtttgccttccttgtgggtgtttttgccgctcattattttgaaatgcgaggcagtgagcagatcaacgagctggggatagcccaagaactgggaagcatggaaggtaaagaaatccgtatcggttccgcgggtacggccctgtggagccaagtgactacggtgacatccaatggttccgtgaacggtatgcacgatagtctgactcccatcacgggaatgttcacgatgttgaacatgatgataaactgttggttcggcggtgtcggagtgggattcatgaattactacgtgtttatcatcatagccgtgtttatcagtggattgatggtcgggcgtaccccggagttcctagggaagaaggtggaagcgagagagatgaagatagccatgatcgtggcattggctcacccgttctttatcttgttgttcacggcgatagctagtttcttggcggctcacaatcccgaactggcgggagcttggctgaataacccttcgttccacggtttaagcgagatgctatacgagtacacctcttcggctgccaataacggttccggtttcgagggattgagcgataacacctatttttggaactacacgtgcggtatcgtgctgatcatgggacgttacctcccgattgtcggtcaggtggccattgccgggttgctggcaagtaagaagtttatcccggagagcgcgggtacgctaaagacggacacgacgacttttgccgtcatgactttcctcgtaatctttatcgtggcagccttgtcgttcttcccggcattgacgttagggcctatcgctgattatttatcattttagaatttgaattataaatcgtgtatgaatatgaaatccaataaatcaacttcacttttcccgcgggaattggtgctggagagcttgaagcagtcgttcgtgaagttaaacccgcggctgatggtaaagaatcccgtgatgttcacggtggagatttgtacggtgttgatgattgttgccacgttgtattttctttttgccgggatcacggatcaggggtcattcggttataacgtggcggtttccatcatattatttatcaccttgttgtttgccaatttcgccgaggctatcgccgaagcgagagggaaggcacaggctgatagtttgcgaaaaacaagagaggagactccggcgaagatgatcgtgaacggtaaagtacaggtgatcagtagctcccaattgaagaaaggggatgtcttcgagtgtgaggccggggacgtgattccttccgacggggaaattatcgagggattagcctctattgacgagagtgccatcacgggtgagagcgccccggtgatccgcgaggcgggaggggacaagagttccgtgaccgggggaactaaggtcctttccgataagatccgtgtacaggtgacgacccagccgggagagagctttttggataagatgatcgctctggtggaaggtgcatctcgccagaagaccccgaacgagatcgcgctgaccatcctgttggccgggttcacgctggtgttcgtgattgtctgcgcgacgctgaaaccttttggtgattacgtgggaaccaatatcacggtggcagcttttatatctctgttcgtgtgcttgatcccgacgacaatcgggggattgctttcggcgatcggtattgctgggatggaccgggcgttacgtgccaacgtgattacaaaatcgggtaaggcggttgaaacggcgggtgacgtggacacgctgttactggataaaacaggtacgatcacgatcggtaaccggaaggctactcgtttttatccttctgccggggtggatgaacggtatttcgtgagagcctgtatgttgtcttcgctttccgacgagacaccggaaggaaagtctatcgtggaactagggcgggagagtcatctccggatgagggatattgacacggccgtgactcggatgatcaagtttactgccgaaacccgttgttccggggtggacttggcagatggtacccggattcggaaaggggctttcgattccattcgtgcgatcgcggagagagccgggaacgaatttccgctggaaacggaacaaaggatccgcacgatttccggtaacgggggaaccccgctggtggtctgcgagaacgagaagattctgggagttatcgagttacaggatattataaagccgggtatccgggaacgtttcgagcggttgcgtaaaatgggtgtgaaaacggtgatggtgacaggggataacccgttgactgcaaagtatattgctcagaaagccggggtggatgattttattgccgaggcaaaaccggaagacaagatggagtacatccggaaggaacagcaagaggggaaattggttgccatgatgggagacggaacgaatgatgccccggccttggcacaggctgacgtgggggttgccatgaacagtggaacacaggcagcgaaagaggcgggaaatatggtcgatttggacaatgacccgacgaagttaatcgaaatagtagaaatcgggaagcagctattgatgacacggggtacgttgaccacgttcagtatagcgaacgatgtcgccaagtatttcgctatcgttcctgccttgttcatggcaacaattccctcgctgggcgtgttgaatatcatgggattacacagccctgaaagcgcgattctttctgcggtgatctttaacgctgttatcatcccgttactgattccgttggcgttgaagggggtggcttacaaaccgatcggagcctcagccttgttacgtcggaatatgctgatctacgggttgggaggaattattgccccgtttatcgggattaagttgatcgatctactgatcggttggttattataaaatggaaacttgtaaatgaagataatcatgaaatcaaatttattgaaatcattcagattgacccttgtattttgtgtcttttttagtgttttctacatacttgtcctttggttgtttgccaaggtggcaggaccgaacggtggaaacgccgaggtggcagtgcttgacgagaaagtggtcgggggtgctaacgtgggacagaatttcacgaaggatatttatttctggggacggccttcctgtgccggtgacgggtacgatgcaaccagttcggccggaagtaataaagcaacgacgaacccggagtatctgaaagaggtggagagtcgtatcgatacttttctcgtgaaacatccctacctgaaacgggaggaagtgcctgccgatattgtgacggccagcgccagcggtttggacccggatatttccgtggcttcggcttacgtgcaggtgaaacgggttgccgaagctcggggaatgtcggaagaggcggtgaaagcgattgttgaaaaggtgaaacaaggccccttgttggggatgttcggtccgtcgaaagtaaatgttctaaaactaaatatggccttggacgagaaagccgattagtttgatttagttaggtgtttattttgcatcgggggatgcgtccatcccccgatttcaaaaaaactcctccgtcacttcgtgccacctctttcttcccctgcctgaggggaagtaccccgaaggggggatggggagggagaacagaggaggagctggtgactattcccgaagaaagggagtatttcaactctccctctgtttatagagggagtaccccgaaggggggagggagtttaaaaaatgacttttggggacacccccgatttcttaaaaatggaagaaacggtcgggtgaccgcaagggatgttattaccc

SEQ ID NO: 351 - DNA, 4956 bp, Butyricimonas faecihominis
ctaaaaaatcactacaagaaacgaataataaaaataaagaaatcatataaataatctgtttcatctcttctcaattaaaatgttacattcatagaaaacgaataagtctgttgaggagggatcgtacctgaccctagagtcaactgctccgggtcacgtccttgcagccccttcgctttgataacaaaaggattacttacgcccaaactcaacgacaaagatttcaagtacaactttttcacgaaatcactattaaaagaataggataaggagatagaattacaacgcaaaaaattccccgaaacaactcgcatatcagcattattgtacatttgccaataattagaagacacattgttcataatatctgtcttatttatcggattttcaccgcccgtgtataccccccgtacagtatataactcatctgtcaatgctggaatattcgtatatttctcatcacctggctttctccaacgcttcacgaaatctgaactcatattttgaccaggataaggtaatttaaaatcatctccttgatacaactcattcaaacgaattttacttccaaactgaaaagagaacgttgaattaatactgaaattcttatactgaaatcccatacttaatcctccggataaatccggctcccgttttccactacataccaaagccgatctcaaagcttcttcctgattcgtaatgataacattcccttcctcatcatgatcctccaaccctaaaaatattggaattcctttattatccaaacctccaaaacgataagaatagaatgtatttaaagcatatccatccctcactaaagaaccgttaagatattgctcataagttacactttgctcggctgtcgtagaaacttcattatacaccttactcgtgttaaatgatacacgccattcaaaatcttctgtcttaatcggggtcaacgctaacgataaatcccatcctttattcgtcaaatctcctccattaattgtcaccattttttccccgttagtacttgttacctgcaaaggcagtaattggtccttactctttttatgaaaatattcaaaagaaccggaaagttttcctttaaacaaatcaaaatcaaccccgatattgaaagaattagttttctcccacttcaagccttcattaggtagtgaattaagagttgcataatactcttccgattttgaatccaatgaccccacagaaattatcatattaggattatgtgcttctgtcacattcgcttgaataccataagaagcccgaatagccaaatccgaaagcacatttaagagtggatccataaaattctcatctgtcacattccaacgtccagaaaacgaccatattggtaaaaaacgagcttgttctcctaatttatttgaaccttctccacgaatattagcactcatcacatatttccctttataagcataggaaaatgaagcataataagcaatactattattcgtcgcatctataattgtcggtttcatctgcaacattcttcttgcagcattgggccattcatccaatttatccaaagacacgaaattttttccacgctctggcaaatatccccaaatctcttcactgattcccgtcgatttttgagattgtaaatctagaccacccaataaactcaagctatgtacctcattaaacgatttattaatattgaaagaaacacgagctgtgaaagaatctcctccattaaaacttgagttcaatattcctccgaacggtaattcacaaacattattcatatagttagacaaattagtcaattgtttccggtcaaaaccatagggcaattttcgataagtagcaactttatacgtacgttcatcataccacatttcactctctgaagcgctagaattataagacaacacagcagaagctgataaccaagaagtaaacttataatctaaatttatattcgtgttgatacttttgatcttattctttgatcccgaataatgcaattcgttaaatacattatataccaatggaatagttaaagtagggccgtccataactcccgcagaataatcataaaagaaccagcttccatcagcattatacgccggaattacccgtgatgtattataagcatactcgaacaaatccaccgtaggacgattcgttgtagacacactagcacctaacattactgctgctcgaaacttatccgatatcttaaatcccaaattcgacataaaactgaatctctctgaattctcctttaaagaagatccctgctgattagcatacccagcagaaaaataatagtcaacccgatcattagcccctgacaaagaaaatgtgtgttgctgactaaacgaattacgaaataacaaatcaaaccaatctgtatttatttctttcatttcctgcacttcctgattaaactgcttttgatcaatcattccattatataattgatataaagccccttcaaaccctgcgtttgtgggagagaatcccacaaattgtaaacctctcttgtagatttcttcagaaacttctattctctcacgagaattcattaaaaataaatcatcataacaaggtcttccaataaaactcatagaagtactataacgaattgacggtgtccctcttttaccgcgtttcgtggtaatcacgattactccattagcagctttagttccatacaaggcagtagaagaagcatctttcaacacatctatacgctcaatatcctccggattcaagccggaaatagcattaccgatcaaatttacacgatccatactattcaactcggttgcatctaatggaaccggatcctgcaatactacaccatctaacacccataccggttcccgattaccaataattgtcgaagaaccgcgaatacgaatcttcggagcagcacccacggttgaagtcatttgcatcacagacatccccgggaccttcccttgtaacatctgatccaatgaagtcccaaccggttctataatatcttctgctttcaatgatacaatagacgacgtagattctctctttttgattatttgataaccagtcacaacaacttcgtccatctcattattcatctccctcatcaccacttggataggtttttcagattcgacaaaaactgttttcgtttccataccaagaaaagaaaaaatcaacgcactattcttgttcacttttaacgagaaattccccttattatccgttgccgttcccgtcaccgttcccttgatcaacacggatactcccggaatcggctccccattctcatccttaactaccccttgagctacaagcaactcatcctttttcacctccttaatcgtgatcagatttccctcgattttgtaaaccagattcgtttctttaaaaatttcatccaatacctgcgaaggagtaaccttcttcatatccaaggttattttcttcttgcaggcatcaataacggcagtggaatacaccaaacgatagttatacttcttcaacacctccaagacctccttcacgctggcatccttcacgttaatgtttattttaccttcttcattctgagcgtgaagaggcaaactcaaacacaagataaaaagacataacaacccttgaaggggaatttttttaacatgacttccccaagaatcaaacatttttttcatacatttgtaaattagaatttaacacttatgccattttaggcatgggatgcagcgagtgttggtagcactcgcttttcctatttatatacagttactacttttccactaattttaaatttaacatcaccaacatcagaaatcacatccaagatcttaccgacctcggcatatttatccactcgaacaaaaaacttctcctgctttacatccgcattctcgtagaataccgtaaagccataccattccgccaattgatccagaattttctccaattccacgtcccggaaaaagaacatgttatctttccagcaaataatttcttctacatccacctcggtcaccgtgatcacgttcatcacgttacccacaactgcatgttgattgggttttaacacaacttccgcatccttccttttcacttgcacgctacccttaaccaaagtcgttgccacctttttatccggcagacacttcacgttaaactccgtccctagcacttgtatatctccattctccgtgtgtacgataaaagggtgtttctcatctctcgccacttccagataaatttcgcccttgctcaaaaacacttcacggctatcaccaacaaaatccacgggaaatctcaattgagtctcttcattaaaccaaactttcgttccgtcagccaacatcacgtgatactctccacccttcggaaccaccacggtattatactcgaccaccacgttattcgctgaagaatctttcttcgaataaacaagctcatttccatttgtgatggcattcgaggtaacctcttttttaccctccactctctgaagctgcagaacagaaccgtcttctagaaccagcatagcctgtttacgaaccggaacaggtaatttttcttcgacttgattttgcaccactatttccggctttattacatttccttgacttatgaagatatagacagcaatagccacgggtaaaatcagaatggcagcgtaacgcatcatctttatcattcggctcggctttttccttacctccatgatccgttcgtgaacctcccggctggtgatcatctttttcatttgcctgtacgcctcatcatcaatatgcagctcggcacgcaactctcgtaacctcccggcatcctcttccgacaagcaatcaaagatgtccttcgtaattaatttatgtagttccttcattatatttttgtcttatatccatgttacacatgaaaagaaaaaatgtatgaaagaaaatttatatttaacttacattaaca

SEQ ID NO: 352 - DNA, 4928 bp, Butyricimonas faecihominis
atatctatatctgaaggaaagatcataaatatagaaaggaattctaattcgtatgatcaatatatttcgccgggatttatagatgcgcatgtccatgtggaaagttccatgttaatgcctgtcgagttttccaaattagtaattccgaatggaacagtgggagtggttgccgatccgcatgaaattgccaatgttttaggggtagaaggggtcgaattgatggtgaataatggagaaaaggcacctttaaaattcttttggggtattccttcatgtgttcccgcaacttcattcgataaaccggggtccattttatctatagaagatacgaataaattagcaaaaaccggaaagtttacgatgctttctgaagtcatgaatgtacttggggttataaataatgacccggatgtcattggaaaaatagaaatagccaaaaaataccgattaaaaatagatggtcatgcaccggaactcgtgggtgatctattgagttcatatattactcatggtatagaaaccgatcatgaatcttcgaccatagaagaggcagaagagaaaatttcgaaaggaatgcacattatgatcagggagggaagtgctgctaaaaactatgatgcgttaaaatcattgattgctacacgtacggatagcgtcatgttttgcacggatgattcacatgctgacgacttattaaatgaaggtcatattaataaaattgtcaaaaaagcattggctgatggctttggtatttttgatattttgcagattgcatgtcttaatccggtacgtttttataatctaaatataggaactttgcatgttggggatagtgcggatttcattattctggatgatatagaatctttgaatatacgttctacttatattcgtggggaggtagtctatggtgaaaactgttctaaaaataatccggtttgtgatgtacctttattaaataagtttcatcatgatgaaataagtttatctgatctccatactaatgtttttggagatgttacctgtattcaagtaaaacctgatagtcttttgacagaccgtaaaacccttcatttcgatgaaaagatagaaaattttcaatcggatttagataaagatgttttgaaaatagtttatttaaatcgttactttaattctaaaccgcaggtcggttttatttcgggtatcggtttaaagcggggagcttttgcttcttctatatcacatgactcgcataatattattgcggtgggttgtaccgatcaagatttaatgcttgctataaatgaattgataaaggaaaaaggtggcttaaccgtgaatgaagagggcaaattacactctttaccccttcctatcggtggtattataagtgataaaagtgggagagaagtggcagatcgctacatgaaattaaatgaaatgcttttaaaaatgggaacaccgctaaagtctccttttatgacactttcatttatggcattaattgttatacctactttaaaaataggagaaaaaggtatatttgattttgagaagtttgattttgtgaaatagtatatggcagaagatgaatttggattgaaagagaaagtcagtaaattacctacgactcccggcgtgtatcaattttttgatgcaaatggagtaattatatatataggtaaggctaagaatctgaaaaacagagtttcatcttattttgtaaagacaaatcagacatctaaaacaatggtcttggtccgtaaaatacgggatttgaagtacattgtagttaatacagaggaagatgcgctattactagagaataatttgatcaaaaaatacaaaccccggtataatattctgttgaaagatgataaaacgtacccttggatttgtattacaaaagaggcttttccacgagtttttactactcggaaatttatccggaacggatcagaatattttgggccttatacttcggctaaatatgctaacaccttgatttccttgataaaatcgctgtataaattgagaacttgtaatttatctctcaataaatcagctatttatagtggaaagtataaagtatgtctggaatatcatatcggaaattgtatggggccttgtgtcggatacgtgcaggaagaggaatacatggaatatattgcacagatccggaatattttgaaaggaaatatttcttccgtgattgattttatgactcgaaaaatgaaggaatatactatttcccttcaattcgaaaaggcacaggaaatgaaggaggccatagaagcattgaaaactcatcaaacaaaatccacgatagtaagtacttcgataaacgatatagatgtattttcttacttggaagatgaaaaatatgcctatgtgaattacttgagaattgttcatggagctgtgaatcaagtgcatactattgaattagagaaaaaattggatgaatcgaaggagtctttgttttcttttgccatttttgagatccgccagttggtaaatagtcgctctagggaggttctagtacctttctacccggatgtattgatggaaggaatgaactatgctatcccgcaaagaggggagaaaaaacagctattggagttatccgaacggaacgtgaaattctttaaaatggatcgggaacgtcaacggggattacgtcggcaggatagtaaattagatttactaaatacgataaaaaatgatttgaaattgcctcgattacctcaccggatggaatgttttgataactctaatatacagggaaccaatcctgtagcctcttgtgttgtttttatagacggtaaaccggcaaagcgagaatacagacgtttccacgtgaaaactgttattggggcaaatgattttgcctcgatggaagagatattgtaccgtcgctatcaccgggtacttgaagagggtggggagttgcctgatttgattgtggtggatggtggaaaaggacaattaagttcagccgtggccacattgcgtaaattagatttattggaaagagtgcctattatcggtttggccaagcaaatggaagaaatatattatcccggagataaagatccttatttgttggcgaaaacttccgtggctttaaagacattaatgcacatccgggacgaggctcaccgttttggtatcacttttcatcgtaaattgcgagagaaaaaacagacaatcagtgtattaagtgaaattaaaggtataggtgagaaaacagaagtatctttattacaatattttaaatctgtaaatgctataaaagaggcatctcgtgaagagttagcaaaagccataggcccggctaaaggaaatgtcgtgtatgattattttcatttaaatgatgtagatgataaataattattcgttcataatatccgtttgacgatcgatagaggcttggtgaatggctttgaacacgcgctccacgagttcttcactcaaattattcttgcgggcctcttcaaggacacgggtaaggattttttcccagcgatccggttggagaatagtaatattattttgttttttatacgttccgatctcttcaataattttcatccggttggtaaggacttccatgatcgtgttatccagagtatctattttttcccggagttcttcgatgattaaggtattatttgagttgttaggatgttcttcccggatgatcagatgggcgagaatttgatttaattgatcgggagtaatttgttgtaaagcatcacttaatgcacaatccggattcacgtgagactcgatgattagcccgtcgaatcctaggtccattgctttctgggatatttcttggatatactctctatgaccactgatgtggctgggatcacagaaaagcggtagattcttgatgcgtcgctttaattcaatcggtatttgccattgaggcatattacgatagcgagtgctattataggacgagaatccgcgatgaatagctcctaattttgtaataccgcataaatagagacgttcaaaagcaccgatccatagttctatgtccgggtttaccggattcttgacgagaaccggaatatcaactccttttaaagattccgcaatttcctgaacagcaaacgggtttgccgtagaacgggcgccaatccataccatattcatcccgtatttcagtgcagcctccacgtgatgggcattggcgacttccgtggaaattttcattcccaattccttttggatattttgtaaccaaggcaatccttttactccgactccttcaaaacaattcggacgggtcctaggtttccatattccggctcgtaaaacttctattccattgtttttcagttgagttgccgtgttaaaaagttgctcttcactctcagcactgcaaggacccgctatcattaacggacgttcttggcgggtgaacagattccattcggaataggattgtatttctaatggcttggtcattttaactacaaaattagaattcaaagatattcttttcttttctaaaaatggagctatccctttactttttggatagctcccggcggatgatgtatttcaacaaaacgttccgtgtttgaaattgaatttggatacttttttagtggaagtctttttacgtgcttgttttgaaactgatacatgactttgcgtgttcttgtttcctttctgaagatttgatttctgtgttttcatgatttttagattttaagtaagactaaaaaacccggctgggatcagccgggttgaatgaatataatacgtgttacttacatttttacaggtaatacaaggtcatcccagctgttgttgaggtaataataatagtagtaataataacgacctgtatgtgaaaaaatagtattcatgtctatggttttaaataaaaaaagaccccgaaattcggggcctgtatattttat

SEQ ID NO: 353 - DNA, 4926 bp, Butyricimonas faecihominis
atacaaaaccttgatgtatattgtattcctttattttcaaaagtttattaagcgcactataaatagcataatcttttcctgattttatttccaacggcaaaacagtaagttgatcggcatcatctatcagataatccacctcaccattatttttgttatcatagtaatagagattaaaaccatgcgcacgtaactcttgcgctacgacagtctcgtacacggaccctaaattgatactccgcacattctgcatgatggcttgaatattatttttaaaaaataaactgtcaacaaacccacgtcattcagataaagtttgagtaaattctttccacaaatctccatcaacggatagctaggaacgctgatagctctcacctccaaagccactcccaccgaaataaggtaatcaaattcatcttcataatccgtcattcgtttgcctttctttttctcaatactttttgctattattcgtttttttctattttcaagatttgacggaataagattatagatacgctgtattttcaatctggcatgttccttttcatattttgaagcatcaaggccgtataaagcatgaatatcttcctgaatcttccgaatggccaccacgttatgttgctccacaaacgtattcaccgcatcaggcaatcctcccacgatcaaatactttttgaacagtactttattagaacctgattgtaagtacttttcaatatagctttcgactttccggtataacataatacacttcttcttggtttatgcagactcaaggatacacttttccaacaaaaaagccacatcaaaaacacacttttcgtatattttacaagctaaataaatacacttttccgaaagaaataataaatctgaatatttacaacgcctttacacaatctaatgaaacatccgcacaaacgcctatcaaacacggaatatgaaccgcaacccgatgtccaccagccacctcgaccaactccccctgaactccagttaattcgccttgaatcacacgtacaccagatccaaccagagcctttccactcacaacttcaagcgatccggcattttcattcaaaatccgcaaactatccaactgttcgtccgaaatcacaaccgggccctgtttctcttttaacaacgcaatcacgcccccaattgataacacggaaggtaaattcatttcagaaacacggacaaaaatacaccccgtaatcacaggaatttccaatctcctcacctgcccgtttctctcgaattcgacctttcgcacaggtaaataattctcgattcctgcttgttccaaacgctccttcacacgtttttccgcccgagaagcagtgaaaactgcataccaattcgtcttctccattactctctgacttctaaattttcggctacctgaattttatttaaaacctcttccatatgatgttctacaccttcctcttccatctggaaatcaatagattcataggttgaatttttcgatttaaactcaggaacaatacatttcatttgtttcaccacggcaaaattatcttttgtctgcaaagctatatcaagagcctttatcgcatccgtaacttcactataattatattcacgtactttggcaatctttattcgttcatgcacggtcggcaaagtcgtctccttcacgttaagcacctcctcgtacaatttctctcccggtctcaaaccggtaaagacgatatgaatatctttcccaacttcataaccagaaagtttaatcatcttacgagccagatcgacaatcttaacgctcttacccatgtcaaaaacaaatatttcaccgccatttcccaacgcccccgcttgcaaaacgagctgacatgcctcgggaatagtcatgaaaaaacgagttatttccgggtgagtaaccgttatcgggccacccgcctctatctgtttcttgaaacgagggatcaccgaaccattcgatcccaaaacgttcccaaaacgagtagtaataaaacgagtattcgctatgcgattcaatgattgcgtgtaaatttccgctatacgcttacttgcacccataacattcgtcgggttcaccgctttatcggtagagatcatcacgaaacgctggcaatcatatttcacagcacaatcggcaacatttttcgttccgaaaatattcgttttcacaccttcaatcgggtgtttttccatcatgggaacgtgcttataagcagccgcatgatacacgatattgggatgatatgttttaaagattccttccacccggctcgcatcacgtacatccccgatctcgattttataatccgtgaaaccacactcttctttcagttccagctcaatatcataaagcggagattcggcctgatcaaacaaaacgatcaaagaaggattaaaatgcgtcaactgccgcacgatttcactcccgatagaaccagccgccccggtcaccaaaaccactttattcaataattgtttccgaagattggtctcctccatgtgaatcacgtccctctccaacaaatcttcgatcttgatattccggatatgccgcatacttaactccccgttaatccaactttcaaaacgaggcacttcgagtacattcacatctgcagccaagcagatctcgacaatctcccgttttttatccggagaaatcatctttttggcgatgaccaccttgtccacccggttacgtttcaacaaaccgggtaaagacgacatcttgtaaatcttgaccccctcgataatctttcccgctttccgatcattcacatcaacaaaagcaagaatattatacgtggcatcctccacgttatccatggcatgttttgccatgataccgtattcatcgctaccacatataattacattctttttagtacgctccgcaccgatatactgcgcaaagactttcttcacgatcacccggctcataaccatcaaactggtcagaagaacgtactccgtgagtaaaacggaaaccggtataaaaagataatcatacaacaggaaaaacacgccactacccaaaagaagggcaatctcccctgccgtcaacacgtagtagatgcgcaaagcatcctccgttcccgtgaaacgtactattccggaataagtatgccccaacaggaaactgatcacccggacacccacgataacgagagccccggtcaagacaaaatccaatctcatccggtcaatctggaaattgacccaaatcagataagcaacgctaactgccataatagcgagagccacgtcaatcaaaaatacaatccatcgaggagtgtatgagaatgaacgcaacgtcctcattctattcagaccatttgtgataaatgcaaccataattttttaatataaaaataaaaccttcacgggataaacctcctaaaaggtggacacccgcaaaggtaatagtaataatattaaaaaaaaaatttttttagtaggccttcaaaatattaacctcatcttcagtcaggaaacgccagtggccccggggtaaatttttcttcgtgatcccggcaaaaaagacacggtccaaacgaagaatctggtaacccaaatgctcgaaaatcctccggacgatacgatttctaccggaatgaatttcaatccccacctgtgtacgatcatcttccgccactctcacgtcatccgcttggataaaaccatcctccaagtcgatccccttacggatagcctccaagtcgcccgtttgaaccaccttgtccaagaacacgtggtatatctttttctggttatacttcgggtgagtcaatttcttggccaaatcgccatcattcgtgaaaagcaacactcccgtggtctggcggtcaagccgtccgatcgggtacacgcgctctttacaagctccctcgatcaatgtcatcacggttctacgttccaaaggatcttccacggtcgtcacgtaatctttcggcttattcaacaccaagtatactttacgttcgggagtaatcacttgatcatcaacctccactcgatccgtacgctttacttttaccccgacttgttgcacgacctccccgtttactttcacccgaccggctgcaatcaacacatcagcatcacgacgtgaacacactccgcctttagcgatataacggttcaagcgtaattctgtctcctgcccctcgttcttcttgcgatattcaatttgttttttcttactatacacacttttgggagcgccatccccatctgcccgacgggtaaacacttttctcgccggacgatcagaataacgatcccgacgatcatccccctctctgcgatcccgacgatcgccacgatacccttctccacgtcctccttcctcacgggaacctctttcccgacgtccttcctctcgtcgatcattacgatccctgttttgataacgattatctcttctttctgcattttcatcccgatcttgaggccgcctttcacgacgctctccacgatcggaaaaacgattgttatccctgttacctctctcgtatgatcttctattatcccgattctcgtaacgattattctcccgatcccctctttcacgatttctgtctgaatcccggtaataacgattcccgttatctcgatctcccgtaccctcgttacgctctctctcccgttctttgttcaaatcacggatatacccgtgtccttgttcccgtctcggtctgtccgtgttgaaacggttaggtcttcttgtttcgctttctccaccttcacggttttcgaaacgcggtgttctgctccgacgattctcatcacgattctcgatcggccttgtaattctaggtcttttagtctccctattcatatacttacgtataaatttttgattttaaatttatgattcttgcttatagccctcatcggcctattctattg

SEQ ID NO: 354 - DNA, 4921 bp, Butyricimonas faecihominis
atatttatctaaacacatgatttatttcacaaagtcatacttttggtcgaccccacgctcattcacattaattccttctttcatccaacgaggcatcggagtatctttcaaataatagtcaaaaaattgttgcagacgaattgtccagtcaatctctgccgccttattataaaggaaatgtctgtctcccttgtaattcaacaaccacgcaggtttatgcaaccgtctcattgccaagaaaagatttaacccttcggaatacggcaccgcctcatccccatcacaatgaaatattagtaacggagtctgaatcttatccgcataaaagataggtgaattcttgatatacgcctccgggtcatcccaaagtgtcttccccatccggctttgtgtttcctcgtacataaacattcgaggcataccgcttcccgttcggataccagtgtaagctgagaccatattagacacggcagctcccggactagcacatttaaacatattggttcgtgtcaccagataagcgacctgataaccagaccagctatgcccttgtactccaatgcgatctttatctgcaataccacgatcaatcaacatttgagtcccactaaccaccgcattataacaactttcacctggggcacctacagtaaaatgtacatccggcataaacaccacatatccattactcacataagttaccgtattaatcatcgcactactcaacgagggaagttggtaagtatgaagatctcctgtgtgagtctcgtagaaatttacaatgacaggataacgtttcgttaaatcataattctctggcaaatacaacaaaccccgattcggttttccctcaaaattcgtccactctaccaattgcacacttccccacaaataattctcttgttgaggattcgtgtttgttattcgtacgggacgtgtgaaatcattcttactccaccaaagctcccggaattctgtatagctttgtcgggtaaacagataaaatttaccattctcggactgctgattaaaatacaaatcataagccccagacatcaatttttttactttccggttaggagtcaacacgtaaactccttgatccaatgtttcacgatctaaaccatgcactaaaatattctgcttggggttaatccaacgcatctctcgattcgctttcaacaaacgcaaagaaataccatgttcacgtccccatccattcgttaatgaatacgtgggttgcttaccagtaagatccaccacccacatatcatatttatcatacaggacaacttgatctccacctgccaaccaacctgcaataccataaggaaccgcaggtttgggtagatcatgctcctcgttatacacggcaaatcctatcggtgtcgaaacatctgtcaattctcccgtttccgggttcaacttataccataccttcttttcggcatgatacagcatggcatattttccattcggactccacacgggccgttgccgaaaatctttaaataataatgtccgttcacccgtttccaaactcactaaatacaagtctgccgttacttcatctcgccaatccgcaagtccccgataaggagtttcatctgcaataataacataacgatactcgtcacaactcggctgatacatctgatctatatgagagggagccaccaatacacattttttcgaatccacgtggtacacgtatttaggcatttttcgtctatctccccctaatccatacgactgcctactctgtgaaacttcatcatcccatttccacaactccaactcaaaactcttatccggtttcgctttcggcttccgttcttcctgttgctgtaatcccacgtccacaaatatatattttccattgttgaaaacagaataaatcccccctcgaactttatattcgtccgatacaaccacctctttagtgtccatcaccaaccgatacttcccatcaacaactgaaaacgtgtataataaatccggctctctcaaatatgaagaatctgaagctaccgagaacactcccttcagcccccctcggttcagagagaaattagtaacaatagctttttcatcatcataaataacctgatgtttcccttttaccagaccaactcgtaaagatttctttccgttatgattccgaatataaaccactgatttataatcgtctgttgaaaaataattttccacgctatctattcgtacagaatccccagtttcaaaattccaaacaatcaaccgacgaagagcccgattctttccatctcgatcaatcggataagaataagaaatcagaggagaatgaggagactctcgaaaaccataaggcttatcccaataagtttttttcatatccttcaaggataacaaaaaaagagaatcttttctctctttcaacgtatcaagcggagagggctgcaccacgtatctcaatccctttccttgattaaaaaaactcatctctcgaacattggggaactcatacaccttaccagatgtcatgtcacgtaaataagtaacaggcacatctttatcatgtccttcttgatctatataaacaaagcgataagtcacccatttgccatcttctgacatctgttgcccctcaactcttcgccataatttataagcctccatatccagaggctttttttgagatatacaatctgctattccaagaaataacagactgtataataatacaatatattttctcatttagatcaacgctttttcatgaaataatcgatatctccctgataatcggctgaatcatcgcccaacaaatatttggcaaaatggaaccacattttccgttcgaagaaatctccattctctccaaagaagccatgcgtactaccgggcaaaacaatcatatcaaaattttttcttgcctgaatcaaagcctctaccacccggaatgtatgcgaaggatgcacagttttatccatatcccccgtcacgatcagtaatcctcctttataattttttgccagctcttggttcgttttgcttttggtctcgaaagtaatctcttcccgatctccgttcacactatccttgatcactcgtttattctctttcaccccgtaatggatctccacgaaccctttattgtatatattattgtcatgatttcccgcacatgcaacagccgcactataaaaatcaggataggtacaaattgccgcagcagtcataaatccacctcctgaatgcccgtacatccccacttttttaccattaataaaaggataacgatcagccaactgctctattgcatacttatcatcagccaacgggtaatcccgttgatttccatatccgtaagtatggtaagccttccccctcatgggtgttcctccacgatgccccatagccaccacgataaaaccgacttgtgccaaacgagtattcaaatcgtcatccaacgtgaaacgggtttgcacgtattcatagaatggccccggatacaccgtagatataatcggataacattttgttgaatcaaaatctgccggtttccacatgataccatatatatccgtcacgccatctgccgctttcactttaaaacgttccggagcacgccaccccatctcatatacccggcgaagatcaggttttcccaactccataatgacctttccctgccgatctcgcaatacatttactggctccaaatctactctagaataactatctacaaaataacgacttgacggagagatcgccacgtcatgcgaagcatcctccggggtcaacaatgtaacagcatccttcttatccaagtcggctcgatataacacgtaataataaggatctatatttttctctttacccaatccaacaaaataaatctgtcgtttagccgtatcaatcttctgaattggtccagccacccaaggcccagaagtcacttgattcttcaaattcccatccttgtcatacaaataataatgtccccaaccggtacgttccgaacgaaacagaatctcgtttccatcattcaaaaaatggattgcacgcatttgataatccaaataaggcttatcctcctcatgaattagaactttcacgtcacccgtttcagtatttaccatacaaatctccgtctcatcccatgtacgtttgtaccgttggaaataaagacgcaaaccatcattactagtatacaggaaatcaatatattgatctttccaacgactaatatctattttccggacttcttttgtatccaaatcaccaataatcaattcatactgaattacgtttttatcgccggctaattcagctttataagtttttaatttcggacgagggtttgccaacgcatcaattaaccacaattcctctactttacgagcatcttcccgaattgcataaaaccggtgtccctttttaagccaatacgcctcacaaccaaaacgtccctccatttctccttcgtcttcccgattaaaagaataatatttttcaccatcattcgttaactgaatctctgttgtatccttccctttggcaggatttcccactgcatacaaattatgatgtcttgcatataacatataagcactatccgccgaataatacatccaataaggagggtaacttttccccttttgactccccacaacctccaattcctttgtatatatgttataagtaaaattacgaccatccatgtaaaaacgaatagtttccccatccaagtcaaactcaaactgtaagtctaataacttcggatcacgagcccggcgagtaatttcactaactttagccaataactcagcattatcaaaaagtaaccttttcgtacgtttgtccggatctaccagataatatttattcccttcttccgtccagaaagaataccaaaaacgatctgtattattaatat

SEQ ID NO: 355 - DNA, 4919 bp, Butyricimonas faecihominis
atatataacatgccaaccacgagattagatgaactatcattgtagacaaagccgccccgtacattcccattgaaggcaccagtagcatattcaagaagaaattcaatatggtaataccaactataacataacttataattttagtcttcttcataatttgcaacccgatcatgcaacattcccgcatcatactgaaaaaaatagcataggtcacgaaaggtatgacgtaaagcgcctctatataatccggattagttgtcacccaaacgattccctcccgcgaaaacagattcaaccctaaagcacaaaacatcaaaccaaaagaaaaataagtcaacacttttgaataaaatcgtttattatccggatcattcattttcttcatcaacaaaggcgttaaagccaattgcacggatgtcacgataaaaactttaagagtattccctactttatatcccaaactatagaaaccgacatcatccaatccttgaaaatgatttattatataacggtcaaaaacagtaagtaaacttcctactatggcgggaaaaactaacggataactatatgccagcaattgtattgtacactttcggtctactcgacaagaactgttcttaataaccaatggcaataccataagtaattgtataacgataccgactaattgcgcctcatacactcccgatactccccgatgtaaagaaattgtaaaataaatcgtcagaactaatgttgcaaacaatcttacgatattcgttaacgaataatagataggcttacgttgtaaacgcaataaattttgtggaacttcaacaactgcccccaacatagaagtcaatatcagtaattgaagaatatatggaagttcccctcccaaagaatacccttcttgctgtaccagtaatgccgataactcaccaacatttaaccacaacacactcccgatacacaaagaagtcaatatcgtaaataacaatgtcgtgaaaaaaatagtcttttgtttatcccgatattcggcatcccaataccagcgaatcaacccggaatataaagaaagtcccatcaccgctatcaaaatttgtgaagtcacctccaataaccccatcaacccgtaatcagcagtagagaaatattcggcatccgtataaaggggaatcagaataaaaccgacaagcttaacggccacatttccgataccataaagtaccgaatctttcatgacttgctttatatctttaaacatttcttccctccatgatttcttgatatatttctatcatattttccacattcttatcccaatcatataattcccgaaccctcttttctccattttgagccaaggtaacccgcaatgtttcatcatttactagggtttccatggcctctgatgcttgttgtggattctcacgttcaacgataaggccggactctcccgatttcacgatttcggtgaatcccggagcatctgatacaacaacaggacagcccacggccattgcctccactacagcaaccccaaaactttcaacccgggaaagcgccacgaatacatcaaaagaactgatgacttccggcaaatgatcatgtactacctttccttcaaatacgattttttctgccagccccaaatttattgcctgtaactgtaatttttctctctcacttccctctcccacgatccgcaaacacaagttcagatctggtcgccgtttacacaacagagcaaaagcatcaatcaacgtatctatcccatacccatattccaaagttttcacaataccaaacacgaatccatctgtctcttgatgcttttttggaaatctcttgaacaatctcatatccacgccaaatggggtaacaggaatttgttttttatccgtatatcttgcaagttcccgggccatcacatgacttgtagacaaaacccgatccgcctttttcagtatatatttaatcacacaagccctgctccatgaacgccggggatagtcatatacatctgttccccatgccgaaacgacgaaaggatgaaaacccgccaacgccccgaataaaccattatccgataaatagtgagcatgaacgatatccggatgaaatgtttgaatggaatttctgatgtcttttatcaacgcccggtaataagtaaacaatttgactaaaataaaccccttgatccctttactatcacgtgattgccagaacgattttacctgtacatgcttaatccccctataatagtcaaccttttcacaaggataaaaactgtataacataatctccactccccgcttagccaacgcacttacccaacgttgagtatgtatcgcggcgggatttgataacatgaacactttcataattcaattcttgataaacaaaaatagcaattattcatcgagtagtaaagatttcatattatattttttatttttgtcgacgaataaacatggccttaaaaaagattcaaaatgaaacagctaaaactgaaagcattctatccccatttatttgcaattatattattgatcctgatcggttttatatatttctatcccacgttacaaggaaaggttgtcaatcaatcggatgtctcctctttcgtgggtgccgccaaagaaacgatagattaccgggccgcaaataacggagaagaaccgctttggacaaattccatgttcagtggaatgcccacaaccatgatcagtacctattacaagggaaactatctggaaaatatttacgaatttctattcgttggtcctcggcctgcagccgatttaatcctaggctttatcagtttttactttcttatgctggcatttggagtcaatccttggttgtccattgttggtgctttggcattcggactctgttcttataatttccaaatcattcaagtaggacataatgccaaaatgaccgctatcgcccttatgcctgctgttctcgcggcacttgtttatgcctttcgaaagaaccgatggctgggagccgtgctgtttggcatcacgctctctttcgagattatggccaatcacccgcaaatcacattctatctggcatttattacgatattctacggtgtagctcaattatacacggctataaaacaaaaggctctaccgtcattcttgaaaacaaccatattgttaattgtcgctgccggactggccggggctacaaatgtgaaccatttatggccgacatgggaatatggtaaatataccatgcgtggtggttcggaattaactttaaatcaaaagaaccaaaccaaaggcggtttggataaagaatacgcgacagcatggagttacgggatagatgaatccctgaatctgttgatcccgaactttaaaggaggagcctctgccggggcattaagcaaaaactcggagacttacaaattcttaaagagtgcgggagcccagaatgctgatcaaatgatcaagcaaatgcctttatactggggacctcaagcatttacagctggaccgatgtacatgggagctatcgctattttcttattcgtactaggattaatcttgataaaaggccccatgaaatggtggatcgtgggtatatccctattagccctgttcttgggttggggacgtcatttcatggcattatcaagtttcttctatgattatgttcctttgtacaataaattcagagtaccttcgatgatgctggttgtactgcaagtgaccatcccgttattaggcatatacacgctgaacaaaattcttaatggctgttttgaacgccaagttcttgttaaagcattgaaaatatctcttggtattacagccggaatttgtgctttattcgccttgattcccgggcttgccggaaatttctccgctcccattgatgcacaagccgaatggttgcaacaatatctacccgcagaacgagaatctttactccgcaccgatgctttccgttcattggcttttatattattggcaggagccgttatctgggcatgggtaattcaaaagctaaaagtaacccaagttgctataatcatggggctgctggttcttgcagatatgtggaccgtggacaaacgttatttgaacaatgaccatttcgttacacaacgagaattcaatagccagtataaattacgccccgcagataatgctattttgaccgataaagatcctaattaccgggtgttggatttatccgtagacgtgtttaacgattcccataccagttatttccacaaaaccatcgggggctacagtgccgcaaaattacaacgctatcaagacatgattgattactttatcattcccgaaatacagaatctcgggaacgcattaaagcaatcaccgacactttcttctatcgagggaagcctttcccagcaaaaagcactaaatatgctgaatgcgaaatacattatcattgatccgaactcggcacctatcaataatcgtttcgcgtacgggaatgcatggtttgttaaagattacgagttagttgacactccggatgatgaaattatcacgttgaaacaaatcgacccgaaagaatctgccgttatcaacaaagaattccaatctattatccaagacaagggattcaatttcgacggaaatgccaccattcaactgacatcttacgctccgaataaattggagtataaaacttccgccaccgatgaacaactcgccgttttcagtgaagtatattacccgaaaggctggaatgtttacgtggatggccaaccgagtgaattattccgggctgactatattttacgagctatgatcgttcctgccggagaacacgtgatcacgttcgagtataaaccacaatcctactttatgggagctaaaatatcagcgataagttccggcatattactacttgcgttattaggatgtattgtattt

SEQ ID NO: 356 - DNA, 4909 bp, Butyricimonas faecihominis
gttctacatgccgggatgtcacttccgcctgcataaatagcgctgccatcttatcaaacattccacctttctccgtggtcaagaattcaatctgccccccccgggaaagttctcgttccatctccgggtgccgacacaaatagtctttcaaacttcgtgctacaatttcaccctgctggatgacggttatcccttccggaataaagcggtcaataacacttctcaacaacggataatgcgtacaagccaacacgagagtgtcaatctgcgaatcagcttgcagaattgtatctatatacttctgtacaaagaaagccgcccccggagaattcatctcgttattctccacgatcggcacccacatgggacaagcctgctgcgtgaccagaaatcccttctccgaatgaattttggcaatctccaacaaatacgactcagacgccacggtccccgaagttgccaagataccgatatgcccattcccggtaaaatccgccacagcctcgacgctgggacgaataacccctaacactcttcgttgaggatctatctggggcaaatcgacttgctgtatcgtccgtagtgctttcgccgaggccgtgttacaggccagaataaccagcttacaccccatcccgaacaactttaaaaccgcctctcgcgtgtacttgtaaacaacatcaaaagaacgagttccataaggtgtacgggcattatctcccaagtaaatataatcatactcaggcatctcttttacaatatctttcaatatcgtcaatcccccatatccggaatcaaacaccccaatcggacaagacatatgtctattatattaaatttatagctgctaatataccttttattcccaaagaatgcaaaaaaaaagccgcccaaagggcgactttatttcattatatatataaattattgaatacctaattttttctttaccagcggtaacacatcctcactattatcagccatgtacaataatgcaccttgaccaaaattaggagttgcagcaaaaatataagtgaaaccaccttctttacctacggcttgaactgcattttgaattttagtaataatcggcgctaataaatcttcctgagtcttagccatttgttcttgagctaattgttgaaagttttgaattctctctgccaatccttgaatttcttgttctttagctgtacggcttaattcagtcagtgttttagcattggcctgatattcttgcatcaatttttgataattctcgtgcattgcagtcaattcttttctaatctcttgctccttagctgctaaatcatcctgtgcctttttaaactccggcatacttgtcatcaccttttgaacatcaagatgacctaacttaattggttttgcagtttgagcagaagtagcaaaagcagcaaacataaatgctactaaagcaaataatttcaacgtattcttcataatgtttgtctttaaaatgatctacaaaagtaataaaataaaattccttttcctagcctacatacataatgtatgcaaagaagctcaaaattatttagagattcagtgatttacgattatgtgattgtattaaatcacgaaacctgcaatcactaaatcactccatttctaaaattcttgtcctaacacaaagtggaattgtgaaccaccagcaccactacgtcccggcacatcgtcaaatccatacccccagtcaataccgagcaaaccaaacatcgggaggaatacacgcaaaccgacgccggcagaacgatacaaattgaagggttcaaaatctttcaactcgtaccaagagttacctgcttccaagaatcctaaagcataaatcgttgctgattgtgccaaagaaatcgggtaacgcaactccatcgtgaacttggaatacaagcttgcatctgaagatttcggggcaataaaagatgaaccggcattagtcaatgatccgttttcataaccgcgcaatcccacgtattctctaccatacaagctatatcctgacattccgtcaccacccatctcgaatccctcgaacggagattttttgttcttatcatagtaacccaagtacccgtactgtgccgaagcatacaacactaacggacgtttctcactacgagtcaacggcatgaaaatctttccgctgaatttccacttatgatattcgatccatctatacttcacttgatccttctctgcctcgaaatgacggtttgagaacaaggaatacggcggggtcaatgtcaatgagaatgtgaattcactacccattcttgtaaacagcgggttgtcaatagaacttctcttgataaccgttgcgatagacaagttattagagttaccatcactgaagatataatacggccaattcttcaactgataacgctggaacgaaatctcattatacatcgtaaaccagttatccggccagttaattcgtcgtcctaatcccacgctaagaccgtaagtcaacattaactgacgagagtcgtacatctgagaagtattactcatataataagagttccggtaactactggaatatcccgtttgccgagagaaatacaatgatacactcaatgaattcggctttcttccacctaaccaaggttcacggaaagacaaactgaaagaagtatagtatttaccattcgtctgagccttcaaactaaacgtctgaccatctccctgcggcagaggccggtaagaatcccaattaaatatattacgaatagagaagttcgtgaaggtcaatcccacagaaccaatgatcataccggctccccaacctccggaaagttcgattttatcattcgctttttcaactaaaccaaatacgacatcagccgttcctgcctctgcattcacatttgccaaatcgggtttaatctgctccgggtcaaaatgtcccatattcgccaactctctggcacttcgtataatatcctcacgactgaacaattctcccgggtaaacatatagttcccgacgaattacatgctcgtgcgttcgattgtttcctttgatgattactttattaatcgtcgcttgaggaccttcaactacccggacttccaagttaatggagtcttctccggatatagtctccaccgggactaaccgggagaacaggtaaccattattctgatatagattagaaacagcatcatcatcagatgtcattcgttcctcaagatatttactattataaacatcacctttcttgatattcaacacatcactcaaaacatctgaaccataaatggtgttacccacccatgtaatattattgaaatagtatttgtttccttcttgtacatcaatataaatttttacccgcttaggtgaaatctgtaccacgctatccgaaaggatcacagcatcccggaaacctttctcgttatacttatcaacaagaaggaatttatcttcatcgtaatttttttctatataattagccgacttgaagaaattacgaagagatttctctttcgtttttttcatagctcctttcagacgcccatctttcattaacttgtttccggtaatgataatctcgtcaatcttgattttgttatgtttttccacgatagcatccaagatcacgaaattactatggtccggatcatcacgttgaataatcctgatattcgtgttataatatcccttttctttcagatacttctcgatctgcatctttagatttgacttcatcaaatctgtcacctgggcacccggtaacaaattcatcttttccttgattttattctcctctgcttttttcagcccgacataattaatcttggaaagtttatgacgctcctttatatataaagccaaataaactttatccccttcgatcttatctatggcaatagatacatctgaaaagattccatgcccatacaatctcttaattgcacgagtgattgtttctccgggaatctgtaccgccatcccgattgacaatccagccatctgtgccaaataatcctcatcataattctcccctcccccaacagctcgcactccagctagttcgtaagttttaggcgaagaataaaaaatatcatattgttgtgtcgtatctgcgacttgggcctttgccccataaacacacagtataaagattaataaaagcgttatttttcctgtcatctgagtcacttttttagttgctctccggttaacccgaatcgtctttctcttttttgaaaattacgaatggccaaatataagtcttctttttcaaaatcgggccaaaatttatcaagaaaatatagttcagtatacgctaattgccataaaaggaaattactaagcctacattcaccacttgttcggatcaataaatcgggatcagggattcccgacgtcgtcaggtaagtggaaaaatctgcgtctgtaaatgcctcaacatcttctattttgccatcccgcacatcttgaactatccgcttggccgctgtcaaaatctcccatcttgccccataacttaatgccaacactagagttaacccggtattagatgccgttctcgttattaatccctgtaacttgttatatacctcttccggcaaatccgacaaattcccgatagccttcacccggacttgttttctcatcaaattatcagtttcagccaaaatagcatccaccatcaaacccatcaacacgtctatctctttcttcggacgattccagttctctatcgaaaaagcatataaagtcaaatacttcaccccgatctccccggcagcctccattgctgttcttaccgcatctactccttttttatgaccttcccatctctccaaaccgtgacttttggcccaccttccgtttccatccataataattgccacgtgttccggtatattctctttatcca

SEQ ID NO: 357 - DNA, 4888 bp, Butyricimonas faecihominis
gagggaaagatgaaaaattcaacgaaagaaattataaatgaaataaatacataccgggacgaatcgaaagcggctttcctgccccgtttcttcaaaacgggtaaaggggagtatggtgaaggggatcaatttatcggggtggtcgttccgaatttgcgtatcgttgccaaaaaacattttgacgcggacttcgacacgctccgggaactactcgcctctccgtaccacgagtatcgcctgacggccctcctagcattaacctatcgttacgccaaactcaaagaccacgcgtccagagagacttgcgtgaatttctacgtaagtcaggtggacgccatcaacaactgggatctcgttgaccttagctgttacaagattttggggcattggcttttcgacaaggacaaacaactcctttatgactgggcaaaagagaatcacctctggaaacagcgtatcgccatgatctcctgtatgcacttcgtgaaacaaggtgaattcaaggatgctctcgcaattgccgaccttctccagcaccaccctcacgatctgatccacaaagccgtgggctggattctccgtgagatcggcaaagaggacgaacaacttttaatcgattatctcacccctcgctacaaggaaatgccccgcaccatgttacggtacgccatcgaacgtttcgaggaagggaaacggaaagcctttttaaattccatgatttaaaagaagtttagagtttaaagtttagaatgaaaaagattccgtgattgccgattcgatgattgagtgtttaaaatcacctaatcgaaaatcattaaatcacctaatcgaaaatcattaaatcacttaatcgataggatctaaaatcataaattaatcagatcataaatctaaaatcataaattactccatgattagttttttacaagtcgaaaatctcagtaaacgtttcggggaacaactcctgtttgaaaatataacttttggaatcggcaaaaatcaaaaggtagctttaattgccaagaacgggatgggaaaatccaccctgttacgtatcattgcgggcaaagactccgcggacacgggttccgtgatcttccgtaacgacatttcaatcggtattctggaccaagacccggaactcaacccggaaaattacgtgtttgaagaagtgttcaactcggagaacccgaccttgaaattaatcaaaacatacgagcaagccgtgaaggacaacgacgcgtcggctctcgaagaactcatcccgcaaatggacgctctcgccgcatgggactatgacacgcaagtgaaacaaattctatcggaactcaaggttgacaagtatagtcaacggatcaaggagctatccgggggacagcgcaaacgggtcggactggccaaaatattgatcagtaaccccgatttcctgatccttgacgagccgacaaaccatttggacgtggagatgaccgaatggctggaagagtacctcgaaaaaacgaatgccacgctactcatggtgacccacgaccgttattttctggatcgggtatgcgacaagatcatcgagatcgacgatttcggtttattcgcctacgaaggaaactactcctactatcttgaaaagagagacgaacggattgaggcccgcaacgcctcgatcgacaaagccaagaacctgctacgcacggaacaggaatggatgcgccggatgccgcaggcccgcgggcataaggcgaaataccggatcgacaatttctataaaataaaagaagtcgcctctcaaaacacgacagagcaacaactggaactcgatataaaaggacaacgcctcggtaagaagattctcgaactggaacacgtgaacaagagttacggggatttccgcgtgttacgggatttctcctacaaattcgtacggggggaaaagatcgggatcatcgggaaaaacggggtcgggaaatcgacctttctcaatatcatcacccgccagatcgagccggacagcggaaccatcgaaattggtgaaaccgtggtttacggttattacaaacaagacgggatcagtttcaaggaagacgatcgccccatagacatcgtgaaaaacatttccgagaaaatcgacctcggtaacggacgggtgatgtcggcctcgcaatttcttgaatattttcttttcccggacaagctgcaatattccctcgtggcaaaacttagcgggggtgaacgccggaggctttacctgctgaccgtcctcatgagcaaccccaacttcttgattctcgacgagccaacgaacgatctcgacatcatgacgctgaacgtgttggaagattatctgaaatctttccaaggttgcctgatcatcgtgtcgcacgaccgtttcttcacagacaaagtggtggatcgggtgttcgctttcgagggagacggcgtggtgaaagacttccccggtaattacacccagtataagaacaaaaaagaagaagaggaactactgcgcaaacaggaagagaagaaaatccctgtcgcacccaaacccgtgagagaaaaagagaaagtccgtaaactgactttcaaggaaagactggaaatgcaacaactggaatccgacatggaaaaactgaacacggaaaaaacagagctggaaacagccctgaactccgggacactggatacggacgaactggtgaaatcttcccagcgaatcgccgagatcattgatttgttggacgaaaaggaaatgcgctggctagaacttagcgagattgaataaaaagacattaaaaattagacacaaaactttaggagtgtattttttatgaggcattcattaaagagaagttcttgatcgtgagcaagaagaaaaagagatgatggtacgcaagtatcttgaaaagatttatcttttgccgtggataaggaaatttactgtatttatctaaatgtcaaagctaaataaaaacgtgaaaagttattggtaacgattgggcaacaatgcatgcaaccgcgctgaagttctgcactttgcatatctcaaacaactctgagagttacgaaagtttctgaaataacaaagccttattccgataatacatttggaacaaggcttttttgtgttgtataaatctacatatagtactttagcctccaagtaagctgagaaatatccgccctcgttctgttagttgaaatttttgagcgggatgattcggattatcaggaatcgttctctcaatcagatggcttgcaatgagtttttgtataactttattgagttgccccgatactttcttctgccccaatgcattggaaataccttgtctggataaaatgttgttcattaagcaacgtagtacctctgaatataaagtcgttttctgcaactcttgctgcaactcttgctgtaactcttgctgcaactcttgctgcaactcttgcttgatctgttcaacccgctcttgctttttgagataatctaacttcacgaactgcacttgaaaagataaacctacctctctccaacgaagctcaatgttcaggtactctttcatttcatcggcaatcaacttcaagccattaccccattggtcaatgataccaagacgtttgaaaataggagctatcactttattgcgagcatcactctgacggcactccattgcggcatagtcgatagatggcagaagaagccccggactggtaatttccaccatatcatcatagatagccacttttacatccttgcccgtgagcgaataatcacgatgaacgactgcattacgaatcacctcacgtagtgccttaacagggtactcccaacgagaaacagtgtaaatcccctcaacagttgcccctttgttaatgtgacgtaaaacaaaattatacgcctcctctgcttgtgtcgcgatattggtggttatgctcttttggtcgataaactcttctgagctaatacctttaaaacgggcacactccacctttgcgtagtggaataatgaagttcgtaacggatcgtcagagaacagaatcaaagcgttcgtaggatattcaacaccttgcaccttcttaactaaatctaatttctttaacgtctgttcggatatttcttcacctgttttctctttgaatatagccttaaaactatctatattcaactcagttgcaggtttatcgggaataatttcgctatcaaatgagatattacgtttccgacgttccaattcggaaataagcgtttcatcggcaaggcgattggtagaaccaactcggataaatgttccttgtaacttacctttctctttgaggtagtaaggcggtgtactacctctgaaaacagtcacctgaatcaagtgtttatcttccacactgataaatttaatctctggcaatatcgcaggatagcaacagtcgaaaatgatgttgctaactttctcctcaattgtcatcaacttatcttcatccaacccaaccacctcacgaggatcatccgccacaccaatatacagatctccacctgcatcattagcaaatgcaaccacaatctttgctaaatcggaatgcacaggcaactccgccttaaactccaatctacgcccttcgggttggcttaatatctcttttatgttcataattaaatcacttccttgtagcaatagttagcatctacacttaacgaccattctattggtaaaataatacctcttttatccggttcatctgttttaattttgctattacacctatcaatttccaaatatagaaaatattttcggataataactggaaatcaaactccttttgaaaaggctaaaccgaaagtgccggattagactttttgaacaacccattttttacctcaacaaactatcttctatttatatacttg

SEQ ID NO: 358 - DNA, 4887 bp, Butyricimonas faecihominis
atactatacaagtataattatttgttattttgataggaggggaataggggcggaatgggaagggaatgggagcggctcgctctgaaatagcaatttgatcatatattgataacattattttacattagatggtacaaaaatttttcatctcacctctgcatttttgaatgtaaaaagtgaaaagcggatagggagctacctgcaaatgtaaactgaattttaaggactctcccgtgtgaattagttttctatccctagtaatagcctagaccttgcctgtacgaattttgggataatccggcgaggggttcccgtgtcgagacttctgctgctccgactgttcatgaccggggtggcaatcgcatcctgcgtgatgagttgaagggttgcagccagcaagggttcttctttatctcccagttggtattgatggtgaaattgctccaagatggggaacatggggggtatgccgcctttgacggattctccccgactgtttctgtattccgtggagatcaacatgatattccaattctgtaagtctttgtcgttaggcgtgtagatgattccacccatatttttccccatggtaatgtcgccaacgacgtttacttccatgtatggggataaggcactgatcagcatttcggcggctgatgcagtcactttactcgtgatcacccacaggcgtttcaagtttagacgggaatcaagaggtaccgtcttgtcaaaatgttcttccaagcgggtaggatcatcagcgtatttttcctgatatgctttattccagcttttgtgaataagcagttcttcgttttccacgacttcttccggggcgagaagtgaacatagttgtttcactgcaaaaatgtacccgccttgattatatcgtaaatccagaatgaattcgtcaatattggctgattttaaggtttggaacacgtggttcagttgtgccaacgacgtgttaccgcggaacacgaaatccgtgtagatcatgtacccgattgtttggttctccaagggaatcaacccgtaatcaagtaccggatcgatcgtgtatgtttgggcggtcagctttttcgtttcgtacggttctgatacttcatcgtttgatagcccgagagaaagctgggatgcgtaatataagtccgtgtaattttccgtcgtgatcctttccccgtccatgtgagtgatcaggtctccccgtttaagtcctgcttttgctgctggagaattcgggtgaacgaaattgacatccgcgaatatgtagccctctttctcccagaaagtcaagttgtagccaaaaccttcgtcatacccggaggcgtcggcaatttctcccaaacctttggaactcgtgatgcgtgaccattggtcctcggggtatttcatggtagcgaaatattccgccgggttactatctggatcaatgtttttgtccttgacttcatccgcccaaaagtattggtcggtcattttgtctttcgtgaacgtgttaatccggacatacgagtaagggcccggagtagggcttactccgcgtgaatcctcacaacttgataggaatcctgctaaaatcgaaaagaagaatagtctatacataagtttatgtctgatagtaagccacaatattacgaatttttaatggatttccatatgcgattttgaataaaaagtttttggtaatattgcatatttattcaatatgactatcccgatcgttttcttcgtgttttagagatggtgaaattagtacgttttcttcgtgtgatgcttgtggtattgggaatgagtggcactttgcttgttgtttttatttcatgtaatatgttgtttgattgtttgttgatggtgggtgtcaaggcgttttcttttctttcggtgaaaaaaatgagaaaatatttgtttttgccgcatattaatgcatatatttgcacggtgaataaataaatatgcacaatgagtaatcaaaaagaatttgaatgatttagattaaatggtaaaaagatgaagattgaagttgtagttgcatccgagaaacacctgtcatacgtgacagcgataaacgatgcgattgatcatgctgcaaaagcaagaggtactggtatagccagaagaacgaacgagtatattgccgataaaatccgaagtggaaaggcaattatcgctctgaatcgagaggagttcgtgggtttctgctatattgaatcatggggtcaccagaaattcgtggcgaactccgggttaatcgtggtaccggcgtaccggggattgggagtggcaaaacaaataaaggaggctgcttttcatctgtcgcgaaggcgattcccgcaagcaaagcttttcggcttgacaactggtgagcaggtgatgcgaatcaatacttcattgggttacgtgcctgttacttttgccaaactcacggatgacgaggagttttgggccggatgcaagtcttgcgtgaattatgacatattgcaacggacgaacatgaccaagtgtctttgtaccgggatgatttatgatccggaggtcgtggccagacaacaggcggcggctaaaaaggcggctaaggggaggtcattgcctttgttcaagcatctgcgtcatgttgtgggggccacgttggcggtttgcgggttaccggtttctcgctctgccatgaaacatacggcaaatttgtaacttgtaatttatattcatgaaaaaagtagttttagcatatagcgggggattagatacctcttattgtgtcaagtacctgagcgaggaaatgggacttgaggtttacacggcattggcgaataccggggaatttacccccggtgagctggccgggatcgaggaaaaggcgtatgccttgggggcgaagaaacacgtgacgctggatgtcacgggggaatattacgagaaatgtattaaatacatgattttcgggaatgttttgcgtaacaagacttacccggtatcggtcagctccaaacgtactttccaagcgttggctatcgttcgttacgcgaaggagatcggggcggacggcttggctcatggaagtacgggggccgggaatgatcaggttcgttttgatctttgtttttccgtgtttgccccggaaatggaaattataaccccgactcgtgatttgaaactgagccgggaagaggaaattgcctatttgaaatcgaaaggagtggagcgggattggtccaatatggcttattccattaacaaaggactttggggaacctcggtgggagggaaagaaacattgaattcatgggaatatcttccgggagaggcctatcctttttctttggagaaggagggtgaagaggagttgatcttgtcgtttgaatggggagagttgtgccgggtaaacggtgaatgttacacggataaaatcgaggctatccgccgggtggaggctttggcctctgcttgggcaatcggtcgtgacacccacgtgggggacacgattgtggggattaaaggacgtgtcggtttcgaggcggctgctccgttgatgattattaaagcccatgaattactggaaaaacatacactcacgaaatggcagatgtattggaaggaacaactggccaattggtacgggatgtttttacacgaggccatgtacggggaacctgttatgcggaatatcgagagtttcctaaaagatacacaacgatacgtttcgggtgacgtgcgggttcggatgcgtccctattgtttcgaattgttgggagtgcggtcagaccatgatctgatggatgccacgtttgcttgttacggggaggagaacaaggcttggacggcagaggatgtgaaaggttttacccggatgttgtcgatgcctttgcgggtgtatcacgcggtgaacgagaagagcgaggagggactatgatcagagtgggtattgccggggctgccggttacaccgcgggggaattgatccgcgtattaatttctcacccgcaagtggaattacgttatttacaaagtgaatcgcaccggggagaacctgtcggacgagttcatcgggatttgatttacacgaatttgaagttttccgatttggatttgacgggtattgatgttcttttcctgtgcatgggacacgggatgtcggctcaatttttagaacggcatccggttccggcatctgtgcgaatcattgatttgagtcatgatttccggttaaagtcgaatgccggggattttatttacggtttgccggaactgaatcgggagcggatacaaggagcttggcacgtggcgaatccgggatgtttcgcgacggcaatagaattggggttgctaccgttggcgaagagtggtttgctgcctgcccacgtgtcggtcttcgggattaccggggcgacgggtgcgggacagaaaccgacggaagagacgcattatagccatcgggcgcagaatctttcggtttacaaggctttttctcaccagcatttggctgaaatacgggaaacattgtccgggcaggatgaagatgtacagacggatattgcttttgttccggtgcgtgggtgtcatgcccgggggatcatggtaaatgcggttttcgagagtgaacgggatttgtcggaaatccgatctgtgtatgctgcttgttacgagggacatcctttcacggtgatgagtgacgaacctgtttatttgaaacaggtggtgaacacgaattattgttttgtccatattgaacggcaggatcgtaacgtgttagtgacttccgtgattgataacctgttaaagggggcatccggacaggccgtgcagaatatgaacctgatgttcggattggaagaaacaatgggtttgggtttgaaagccagttatttttaatttattcgagtatgtttgatg

SEQ ID NO: 359 - DNA, 4872 bp, Butyricimonas faecihominis
tgtcatgactggtttattataaatattccgggttatttgtaacggaccccgacggttctccagtctataattgtccataatttttcgatgtgttccggacggcgattctggtaatcaaggtaataagcgtgttcccaaacgtcgatccctactatcggagtgtaacctttggtaattgggttcccggcgttgctctcggagaaaatgtatagtttcccttttttgtcctttgcgagccatacccatccggacccgaataacgaggtggcggcagccgagaactcctttttgaaattatcgaatgaaccccattctttttctatggcagcaagtagcgctcctgatggggtatgttctgctttcggagagaacgaattgaaatagataatatggttcagcgcttgtgctgcgttgttaaatatcgctccggtggagttcttgacgatggtttcaagatcacaattctcgaatggtgtccccatgatcaatttattcaggttatcaatgtaggttttcagatgtttaccatgatgtagttttatggtggtttcactgataacaggtgcgagggcatttgtttcgtaaggtaaaggcgggagggaaaatttctcttttgttgtttgttgttgagcccacaatgccccgcttgtcgtgacgagaagggcaactatccatatctttttgaatgcttgttttgttttcatcttctatttttcttttaaagtttatgtcatttacgaataaaagtacattttggttattaaaaagtcctctaacttttataattttgactatttttatgaaagagagcggtgggggaacaaatgtgcaatttcaaaatttgagtatatgatcaggataaatgttacaattgaggtgaagagtgaggttcgcgctcatgtcgtggaacttttgcatgagatgtctgaattgtcaagacaagaaacggggtgtatcgggtacgagatatttgaaaatagtcgtttgaataacgtgttgatgatcgtggagacgtgggaaaatgaagctttgttggctattcataaagaaagcgaccatttcgtgaggattattccgcaagtgcgggagctggcgacggaaatgtgtagccagaaatttacggatatgcttccataagcgcaagaagacattttatcactcgttaaaaatattcgtaaaaaaatcactaaaaagagaaccttttcatgtttcagttcgttaaattaggtacgaacataaaaattaaagaatatgaaacatgaaacttcaaatctactgatagggctaggtattggcgctgttgtaggagttgctgtcggttatttaatggtagctgataatcgtaaaaaattagcggaaaaattcgatcatgccgtgtctaaagtgaaagaagaggtgaaggaggtttattcaaaagcaaaaaacaaggccgagaacgtgaaagaacacgtgaccgaggatgtcaatcatgtagctgaaaaggttgcggggaagactgctacggaaacgaagtaatagcttatggagaatattgccgagaagacgttcgctgagttgaaagaggatatttcaacttacgtggaattgaggctagagctattaaaattgaatacatacgaaagggttgctaagacaatggcagtcttttcgtatggtattgttttggttttattggctttttttgccattttatttttgttcttggcgttaggttttttcttgggagaattattgggtagcatggctttgggattcgtgttggtggttgggatgtacctgttgttgttcggtataacgatgtttttcaagagaaagatcacgtccaaggtgatgaacgagattataacagcaatgatgagtaaggatgaaaaggataatgaggagacaaccgaccccgctggacatgttgatggcggaacagcgccgggtgcgtgagagttgccgggtgcaggaacagaaaataaacgaggattttaagttcatacatgatcattccgggcggattttgtttgccgggatttcttctttgtttttttctaaacgaagagaaaacgggaagaatgacgggggagaagaggcggaaggacaaatcccgatgttgggaatgatgtttaaaaatatttcgcccttgttgtgggaggccgctttgccaatccttttgcgttggggattggggcgagttggtaatttgtttaaaaaacgccccaaacgataaaagttaaaagataaaaactaaaagttgaaagtaggaaattaagaagcgtcggccttgtgcggttggaatctaaaattaataaggccttgtgtggttggaatctaaaatttagaatctaaaatctaaaataaacgacgagttttattatctttgtgtcctctattcgggttatatttctgaaaatagtgggtcaatcacggccattccatcaagaggtgttttattttaatagaaggaggataaagagttatgtcgagtattaatgcatcgcaggttttggagacaaagccagtcggcaagttattgttacagtattcaatccctgcaatcatcgggatgacggtaacgtcattgtataatattattgatagcgtttttatcgggcatggcgtggggccgttagctatatcgggtttagcgatcacttttcccttgatgaacctgattattgctttttcgactttggtgggcatcgggggtgcgacaatcagttcgatttatcttgggcagaaagacacggagaaaacaaattctgtcttggggaacgtgttgttgttatgcatgattaatggattttgtttcgggggattgaccttgatattcctagatccgatcttgcatttcttcggggctagtccggcgactttaccttatgcccgggattttatgcaggttatcttgatggggaatccgatagcttttacttttatcggtctgaataacgtgatgcgagccacggggtacccaaagaaggcgatgttaagttctttactgaccgtgtttgccaatattattttggctccgatatttatttttcatttggattggggaatccggggagcggcattggccacggtaatctcccagtcgatcggtttaatctggatcgtgagtcactacctgaacaagaacacgacgatacgttttaagccggggatatttaaattgcgaggtcgaataatcatgagcattttttccatcgggatgtcacctttcttgatgaacgtgtgtgccagttcggtggtcattatattgaataacagttttatgcgctatggcggtgacttggctatcggagcctacggaatagtaaaccgggtactgaccttgtttatcatgattgagatcggggtgacacaggggatgcagccggtaattgggtttaattacggggcacttctttttgaccgggtgcgtaagactttacgttacgctttgattgccgggttttcgatcatgacattcggttttttattaagtcagctattcccttcggctatcgtggggatgttcacggataatcacgagttgatggaattatctaaattcggcttacgagtgacttgcctgatgtttcctcttgcggggtgccagattattatcacgaacttttttcaatctatcgggaaagctaaagtctccatatttttgtctctttcccgacaattactatttttgataccgtttttgttaatattgcctcgtttctggggaattacaggcgtgtggagtagtatgcctatggcagattttatttctttcatgaccacgataggtacgttcatgtattttgtcagaaaagggcttttgtttaaaaccaataaaatagtggaatgaaaatagttaaattattacttggcgtgtgggtagggttatgttttggggcgtgtgacaaaaaatcggatttttttaccggggaggaacgggaacgtatcgggcattcggaagaggcgggaatcatgcccctgtttcttgtcacagaccgggccgattcattgtttttgcgtttacaggcaaaggaattcgggaaagaagatatcgagacggaaacttttcgtgttttaaggtcacgtatgcttgctaccgtgagggattctttgaacgagggagtgggtattgcggctcctcaagtcggtatatcacgtcaattagttgccgtgcagcgtttggataaagtgggagagccttttgaattttacgtgaacccggaaatcgtttatttttctcaagattcagttttaggagaggaaggttgcttgtcgatcccggatcggacgggggcggtatatcggtctaaagagattatcgtgcgctatcgggatgaactttctttcgagtggagacaagatacggtgagagaatttacagcccgtatttttcaacatgagatcgatcatttgaatggaatcctgtacacagattatcttctgtaagttttaaggatataaataataaacgggttctcgattttcgggaacccgtttattaaaaaaatgtctattcgtcgagcgttacggctcctgaaagagccacagcctctttattacggaaagtcatgatcggtgatacagcctcgtaagctgacatgatgtactcgaagagttgtgccgtcaccagttttccgcgttcagctaatgagagtttcaatttaatacccgtgtcctcgtcttctgaactttgtaattcggagagttccccgaattgtttggtttctaatagatattgcacccggtgcaattcatctgattcgaaaaataactcgtaatttttctcgtcccggttcttactgaataaagttgttttcatcttcttgtgttgtgtgtgtgtatatatatatacaacgttcccagcgttgctctgttttttatatcaaagga

SEQ ID NO: 360 - DNA, 4866 bp, Butyricimonas faecihominis
ctcttaaaccacaccaaaagatataacaacaagatcacggccgggaagacaacaacaaacgccaccttcaaggtcccccgtgactggtaggacaatttcaagtgattatccggttgtgccgggcgaggaaaataagtcgggtattgataatcagccatccagctacacataagcgttgtcaacggcccgtttgccactccataatatctactcttgctaaactccccggtcgtcatccagtcagcatctccgaaaatcaaaatacgctgctccttcccgttcaattggcgggtcaaggcaagcaccacgggtaactgttgattgatttcccctgctttcgggttaaacaccgggacttccccctcgaaatccgtcgtttccaattcagtccacgaacctaccggggaaaccactaacggtacaacgttataccccttatccatcgtgtaactcaacccaacggcccccgtcatgctcaacgggtagttgcggcttgcccactgggcgaacgtcgggtgaatcgctcctgcctgtggcgtgaaaacagcgttaatattcgtcgggtcctcatctttacgaggttgtatcaacattccgggtaaagccttcaccccaaaatcctcgagtaattcccccgtcacccccgaacgattaacatccgttgcgaggatcaaatggcgcccgcttgccacgtaagcacggattttttccagttccaccgctgaaaaaggttctttcgggtctataattaaaaggatttgcacgtcatccgggatcgcccactcttccgtgagcggcacgcttaccggatcaaaaccttggttaatcaacgacccgcgaccggaaccattcgtgaaaagccacccgatctcccgatccccacttttgttcatttcccgttcaccatgtccgtagagagaacccattttcacggctccatccttcatgcgcaacagggcaacagatatttcctgttcactcgggtaaggattcaggtcattgaacattcgcaaataggtccagtttccctcgctatcctcaagcgtacggacaacttgattattttcaccgcttaaatcatgaatcttccgtatttcctcgggagaaagcacatcatcaaaatccaacccgttcaccttagcttgttttcgggcagcctcttctagatcttctcccggtgcacaacaggaatgcccgttcaacacgtgatcgtaataataaatgtatttgaacttcatgtccggtttgaaacggtaatatttgctgaacacggacatatccccaatccgactcttcgggaacattctggcagccgtatgttcgtccatgatgttgacataggttgtcagtgttagttcctgccctttgtaacgttccagtatatcacgactctttggagttagtgtcaactgttcgtcacgggaaaggtccgtaatacatactgtgtttcgtcgggaagttgcataaccaatccccacgatcacgaccaccaaagccaaatacttcaccactttcgtgtaccacggtttactctgccgagcaaactgcaatttcatgatggacatcccgataaacagcgcaggcattaacaaatagtataacacgtcaccactattaattaacccggctatcgggccgtgaggtccactacaaatccagtaagttatatctctccagaaatccactccttgtaaaactccgccaataacctgcaaaatggttaacgccgcaaacgtaccgatagccgccacgacttgatacgaggttaaacaggaaacaaacaatcccacagctgaataaaggcacatgatcaagtaaatacctatcaatccggtaatcgccacgggataatcaaagtccttcagcacgcacatgtaaaaaaccacgtaaaccgtaacaatcgctagcatgatcaacccgtagagcatcatcgacaaatatttccccaacacgatctgcgtgctagtaatcggcgaagaatatagtaatttaatggatccactactaaattcccggctcatcaatcccatcgtcaacaacggaaaataaagatacaaataggaaagtacaccgggaaataatggcgtaccgaagccggtaagcagaaaataagccgtcattccatccttttcccggttattgatgacaaaatctttcaattcccatataatcctgtccgtgaaagtcatgctcatctgaaaagtaaagatgaccagcactaaccaagctatcggggaacaaaataaagagtttagttctgatttcgctattctatatattgttttcatatcctgtaacattaaaatttatcaaccactcgttttcccgatagctgagcaaaaatctcatccatggataccttttccatctgcatctcgctcaacctccatccccggttcacacaaatttccgcaactcgtttggccacctcttctccttcctgttcgagctgcaaccggaaagaatgttcatcgagtttcttcaccttgatcactcccggaatatttcctaattccccttccgcaggagcattctccaacttcacaatacaagtattggatttaacactgtcatgaaattcatcaagtgtcccggaaaagatcaaattaccgtgttctatcattttaatattctgacaaatggcctctatttccgacaaaatatgagtggaaagcaaaacggcatgatcttgcgcaatctcccaaatcaaatccctgatttccaagatctggttcgggtccaaaccatttgtcggttcatccagcaccaccaatttcgggttatgcacgatggcctgcgctattcccaagcgctgttgatacccacccgaaaggttcttcacgagccgcttgctaaaatgagcgatcccgcaacgtttcatggccgattccacggcggccttcacctcccggtcatccatcagccgcagatgagcgcaatacgtgaggtattcactcacgttatgatccgtgtacaatggcggtttctgtggcagaaaaccgatgtacttcttggcctccacgggttgcttacgggtatcgataccattaatataaaccgttccttccgtctggttcaataccccgcagataatattcatcgtggtcgacttccccgccccgttcgagcctaaaagccccaaaatccccttctggttaatttcgaagtttatatccctgatcgcccactgaacactatagcgatgggataaatgctccactcttacaattggttcttccataaatttctttttacaatgacttattttttatacacaacactcccttagagattgttactacaatccttaatcatatccaatattcatcgtgtgagggagttaaaaacatcgctttcaactcacctcctcacgatagaattaattattattattgtcttgactgttgattaaaattagacgaatttccgtatttatactgcacatccacgacacgtcccaaattctcggctttgaacagcactttttccttctgaccagtcatagcctcgaaagacgcatccagtatatagaattctccgttatccagacctaccgctatttcctccctgtcctcgtaagcgtaacgctctatatccaaaattgtggctccaccgggaaacgtgtagtacggctcaaccttactcacccgatcccaatagtaaagaacatttcccgccgtaaaatagaagtacgaactcccatccatgcaatatttagaattatcgttcacgtaaccattcccgacaaacaattcttctttaccaccatagacatacaggttcgcatcacctaaagcaggaaaagcagctttataggtttggaaataataatcagacccttttttaataatctgcacgaaatctctcccggaagcaccttccacgctatacgaatcaatatacatcacttgagtaccttcgcccatattatttattggagtaaaagttggcaaatgcgtactatccggatgcatactaacatagatgattttctccgtatatagctgaggactatcatacatacctatcattcggtggttcaattcatcatacatataaatataacccaaatacgcacagtagtacatattagcaattttagcattactaatcgcaggaacatcattatattggcatacttgaaaacttccattcgggtttattcgggtataaagatttccatcggttcctaaaatagcctctaaccgactgccatactccgcttgtttcggtacaaaaccagaaggatagtctttttttacaaattcctctttcgtggtaatcactttcgagaaatcaagaccacttatttctacagcaccactttcttggataaccagaatctcatcacttgcactagaaaaatgtcgtcccaagcggattggcccggttcccaaatcatctccacggagttccgtgtaaatattttcaaaaagattataggttatttcattttcacccgcttgctcggcccgaacataactcaaaatagatttattattttgttcggataaaattgtccaccccgtggaataacgtgataccgtgttaatatcaatctgtttcgatgtcaatgaaccggtcggtacatgctccacgatgaatacggtcatgtaacgtgcaatttccttaaaagtatatcgtaacactttctctcttgaaatagtatcactccattcctcctgaatctcgcttacccatgcataaacaaattcggtagaatctgcacctccataatcaataaccggggtaataacatattcttcacccagaggggttgaccaattactggatacattactgatcaccacggtttttaattccgtgtaatcataattcccctcatcgtcaatacaggaatatagc

SEQ ID NO: 361 - DNA, 4864 bp, Butyricimonas faecihominis
gtatatatacaatatatagaaaatattacttacggtattgatgagttgctgatgcactatcaataaagttgcctttaagctactgtttagtattttcggactactccctcctgttctctcttgcacggggagggagcagattatcaatcggttgtccctcctgtgcaatgagtggttaggggaggcaatcgtttccttatagatagagcatcatcttcaaactttcttttgttgccatttcgtgtacttgaggtagagtaacgaaacgacaccgattaatatgccataagtgatttctacagtccgcacgaatgccacatcggaacgaacgaccgtggtgaacagccacgtttggaacgtgtaaaaaataaggacaaaactctcaaggatgagtgcatgcgtggtgtttcctgtcccggagatggcctcgaagaacgtgatcccgaaacaaaaactgagggctgccagaccgaccacgtaaagagacggaatggatgccgcgatcagtttgctactattggagtagatggatagcacgtaatgtgggaatatgtagcatataagtagaacgggaaggacgcttagcatggagagcttcacgatccggcgtaaggtactcatgatttccggttgtctttgttccccgatcaagcggctggtcagcgtgtttgcagtcgcaccgtaaccaaataccgggatgaggataagcatatagacactacgtacgataatggttatcgcgatgggacgctctcccatgtgttcgatgagcatgaaaaatatgtactatgtcccgaatgacaatagcttttgcaacatggtcgggaaggctgttttcagcacggtgagcatgagccaaccttccaatttgtggaacgagaaaagtgcatattgtttgatcgggagttttaatatagtatagaaaatgaaaataagacaagcggaaatctctgccatcacggaggctagtgccgcaccaccgactcccaattccggaaaaccgaattttccgaaaatgagtaggtagttgaaaattacattaatggtggccatggcagccgttgagtagccgatgatcttcgtgttggagaggccgatgtaaagagcccggaacaggaagttgaaacacacgaatataatcccgtaatggcggtaggacatatattccatggctgccgcgtagatgttcggggactggatagaggctccgagcaatacatcactataatatcgttgaatgaggaaaagactcatggacaaaaggaacacgaaacatagtccgtgttcgaaaacgacaccgatccggtttaatttaccttctcccaatcttctcgccacgatgatttgtatcccgatagagaatccccaagccaaagtggaaaagacataatagtaaattccggccatggcggaggctcccaaggcaacttcactgacccgtcccaagaatgccgtgtcggtgagggtgatcagggtttgtgccaaactacccaagatgatcgggtaagctatggtccagatggttttgttcgtgatgattgttttcatgcaggtgtttttatgatacaaaattacgtcggtatttcgaaaattaaaaatggttagtggaaatttgaggaataaatagtaacttcgtgagtttaaattttaaattcagaaacaatgacaatagaagaacaggttagcaaaggcatcatggctgccatgaaggctaaagataccattcgtttggaagttttaagaaatataaagaaggtttttatcgaggcaaaatctgttgccggggctccggagcaaattgctgatagtgaaagcgtgaagattatccagaagttagccaaacaaggacgcgagtcggctgaaatatataaaaatcaaggacgtgaggatttgtatgctcacgagatggctcaggtggaagtgttgagcgagttcttgccaaaacagttgagcgaggaggaactgagggttgcgttgaaagcgatcatcgagaaggtgggagcgacttccgctaaggagatggggaaagtgatgggtgttgcttccaaggaactggccggggtggctgacggtaagacgatttctaccattgtaaaagaattattaagctaaggttcatagggatctaaaagaaaggtctaccgggtttacgattaggttattgattttctttatcggctgattgaaaatagatattggaaatagaggggattgatgaaataattaacgacctttgtatatatgtaaagatattcacgcgacgggaggtagggaagcaaacgtgtcgggtgagttttgtagattttaggacttttatgaacttgtaatcgagtaaaaaatgagtagtgtaaaagattggactgccagcgtgatcaaacaggcagagatcgataagtatctggatgggggaaaggattttattgacgaggaacagatatttgcagatattgaaaagtataaaaatcccgataagcaacaagttcgggatattttacaaaaatctttggatataaagattttgactccggcagaaacggctacattgttgaacgtggaggacccggaattattacatgaaatgcaggaggcggcgttggaagtgaagaaaaaagtatatgataatcgtatcgttttctttgctcccttgtatttgtcgaatctttgcgtgaacagctgtaaatattgcgggttccgtgcggagaataaagacgaggttcgccacgtgttgacgatggatgaggtgcgggatgaggtggctgccgtgattgatgagggacataagcgaatgattgccgtgtatggcgagcatcctaaaaatggagccgactatatcgcggattctatttccacgatttattccgtgaaacgcacgacgcctacggggaatggtttcaataatatccggcgggtaaacgtgaatgcggctccgatggagatcgctgacatgaagaaattgtggcgcgcgggaatcggtacgttccaagtgtttcaagaaacttaccaccggggaagatatgccgaattgcatccggcaaacacggtgaaaggaaattatcgctggaggctttatgccatgcaccgggctatggaagccggggtggacgatgtggctatcggggctttatttggtttgtacgattggaagttcgacgtgatgggtctggttcaccatgcttgggacttggagaaacatttcggtatcggaccgcataccgtgtcattcccgcgtatgcaaccggctcccggttcattcttgagtgaacattctccttatattgtgagtgacgaagccatgaaacgggtggtttccgtgttgcgtctggcaattccgtatagcgggttgatcgtgacggcacgtgagaatccggagctgaaacgcgatctgatcaatcattacgggtgtacgcagacggatgcttcttccaagttgggaatcggggcatacgccaagaagttgaaacaggaggagaatccggataaggtgcagtttatgttgggtgaccagcgttctttggacgaggtgatccgtgagctggcccatgacgggatgattacttctttctgtacggcagggtatcgctgcggtcgtacgggggataagatcatgaatttgttggagaaaggtgtggaaggtaaattctgtaaactgaatgccgtgttaacgttccgggagtatctgaatgactacgcttctccggagactcgtgagatcggtgagaaactgatcgcgcaagagttgcaggaaattgaaaatatgccattctttacagacaaaaagttactccccacgttccgttcctattatgatagaatcgcgagaggggagagggatctgtatatgtaatttagagtttagaatgaaaaagattccgtgattgtcgattcgatgattgggtgattaaaatcacttaattgaaaatcataaaatcacttaatcgataggatctaaaatcataaatctaaaatattaaaaggggagtttgagcgtgatgcgttcagcttccttttttctttttatttcttctttttcacctttgcggaagacgtagactaggccgaaatgttcgcatttctggcggcgtatttcttcgtcttcgaggtctgcgtaatgagcctcgatttcgttccataaggttagaatgtattcgtcagcctcaccccggtattgagcgacttctgcgctgcaacgggcagagttttgttggaattgcttctgggaggcgtaggcttgtttaaagttttcgtagtttactttcaccaaggcgatggaaggactgtacacggggctaccgccaccattgcgggtgcgttcctgttctccggcaatgacttttgctccccattccagtaaatcctgatcagaaactagtgaagggagttttgtgtcgttttcatcaattccatagaatgttcttgccacgggttttaattctccccgggcgatcgtgaagttcagtacttgcaggaaatgggaaatgtataattttgcttttcgggtatattctgcatatttcctactgttcacgttttgtttatctctggcgcactgagaattcgttattgccgttttaaatcttggtaaaaagaattcaatcttttgcctaagatttaatgaaaacggtaagttgttgatattagaaaactcttcgttattcaaggctgtttctaatgcccttatccttgctgcgtctgtattcggtaatcttctgtaaggcatatccttagcaattagttaaataatgatcaaaactctgatgcgaaggtatgaaaaatattaatgtaaatcaatattcgccttccgaattttaaattgcatgattttaaattttaaattgagggattcggtcatttcatgattttagat

SEQ ID NO: 362 - DNA, 4823 bp, Butyricimonas faecihominis
ataatatcccaagttaaaataaaagcccagtttctttgaccaatccgagagactgaacatgaaatcaatcggtcccacgatactatcgtaagaatacccgacacccccgccccaaatatcatcacctccaaatatatcaaagaaattagcctcctgtttcgcataattcccggctagagaaatataatggttacgaccaatattatacctcaccttgacttttgccaccacaaccgaattatcgaatatctccagatgctgaattcccaagaaaggcaattgttgatcgacatacctcccggcaacatcccctcccatacaattcaaatagggatagggaacatcatgccccaccagcactcgcccgtaaatagacggaataaacttcacccggcgggtgatggacagcacggactcgaaatccaacccgatagctgagaacggtgccccgtcattataggtgatcaaattatccgtgtacaaggaataatccactttcagcgacattccccgtgtcgggtaatagcgtttatcaaaggtttccaaatgtgccagcccgtaataactaaagaacccttccggtttcaccgaaatattatgatctttgtccgagaagaggaacgactcgtaattataatactcgtaacgaacccccagctgcaatttaaagttacggaaataaatatcagaacctccaaggtttacccgatgaaccccgtaatccacgttatccgttttctttcccttggtataaatatccaagttattatacttgaacatatactccaattcaaaacgccgcaggaaagtattgcccagtgaataattcaacttcacgtaaggattcatgcttaaacgtccggtcagagaaagccgcgaacctctcaaatccttgtgagtaagcgtggtattcaataaaatagccgccatttcttctgaatcaaaccggaaaccaaggttcaaagaactcataggcttttgttttagtatcaattccaaatcgtacactgggccaccactaagcttgtaactcacgctcgaaaatgccccgatcccgtacaattcggcaattgcctcgtgcagatcgctcaacgtgatccggctataatcctttatccgtatctttttccgtaaccatttctcatcccgttcatcaattcctgacagatgcacgtgttccaccatgatcgtatcattctcgataattatatcttcagatatttttttcggttgaaaactttctgtaagtcccagctcttttttcaattgcatcaattcatcccattgactccgagccacgtcctcaccccgcatgatcagcgtgtcaatagcgcttgacgaaaaactggcggccgaataaggtgtaacatccggtttgatatagatgtttaccatctttttattttcctcgtacttctggatacctaaaaaagaggtcatctggtcaagaatccccatcacggattctagcccggatgcatctttcagttccgcctgcacgtctaccccgataattatatcggctcccattgctttagccagatccaccggaaaattattggagattcccccgtccaccagtaccataccatttttccgcacgggagcgaaagcccccggaatcgccatactcgcacgcatggccagcggtaacacgccgcggtcctgaacaacctccttaccatccaccaaattactcgccacgcaggcaaaagggataggcaatttcttaaaatccaacgaatcatggtaaccgattgtcagatccgagaacaggttgtaaatattctgcccactgatgaatcccgatggaattttgatctcccggttattctttatcggcacggaaaccagatacttttccgtttcctccttctccgagaaagggagattataacgatatactttatcactcaacaaaaacgtccagttctgtcttctcaccaaactatccatcgtgtgcgcatcgtacccgatcgcgtacaacgccccgacgagagaccccatactcgtccctgcaatataatcaatcggaatcccagcttcctccaacaccttcaacactccaatatgtgccacgcctttcgcacccccaccactcagcaccaacccaacctttttccgttgaccttgaacatccaatataataaataaaacaagaagaaacaccaaaattcgtttcatacattccagaatttaaatttaagaggttagatcaaaaaagataccattcttctcgctctaaacttcccaaaaatacaaatttctcggaacattagcaactcaacttcccaagttcgcacaatatctgacatttctttttctaaattatttagctaaatttgcggtgagactaaaaaatgtagtatgacgaaaatattagtgattgatgatgagagaagtatccgtaattcgatgaaggatattctacaatacgagggacacgaagtcgtgctggctgaaaacggaatggaaggcctcgtttccgtgaaatctgaaaaacccgacattgtattctgcgatataaagatgccgaaaatggaaggtatcgaagtactggaacgcatcaaagagttctccgcagacaccccggtaatcatgatttccggtcacggaaccatagacaccgccatagaggccatccggaaaggggcttatgatttcatcgaaaaaccgttggatttgaatcgtatactgatcacgataaagaacgccacggacaaacatttattaattcacgagacaaagaccctgaaaaacaaggtcagcaagaaatacgacatgatcgggaattccgaggccttaaaccatatacgagccatgatcgacaaggtggccgtttccgatgcccggatactggtcaccgggcctaacggttccgggaaagaactcgttgcccaccagttgcacgagctaagccaccgcaaggacaatgcctttgtcgaggtaaactgtgccgccatcccctcggaactcatcgagagcgagttattcgggcatgagaaaggttctttcacctcggccatcaagcaaaagaaaggaaaattcgaactcgccaacgggggaacgctctttctcgacgagatcggcgacatgagcctcaacgcccaagccaaagtgctgagagctttgcaggaacaaaagataacccgtgtcggtggggatgccgatattaatgtagacgtgcgagtcattgccgccacgaacaagaatttgaaagaagaaatcaagaagggaaatttccgggaagacctctatcaccggttaagcgtgattattattgacgtacctcctttgtgccaacgtctggaagacattgatgctttggccaatcacttcttgacagaagtatgtacagaaatgggcatcgcccccaaaacgctttcccccgatgccatcaccgcactgaaggagtgcgaatggacgggtaatatccgtgaactacgtaacgtcgtggaacgattggtcattctttgtggcaacactattacccgggaagacgtgaggatgtacagataatgggaaagataaaagaaaaaagataaaaactaaaagttgaaaaacctgtaacttgtaacttgctaacctgtaactcgccgggcgaatcccggcaggaatctaaaatttaaaattagctcgttttatgggaaaagataataaactacatattatattattgggccggagaaacagcgggaaaagctcgctgataaatgccctgactggtcagaatattgccatcgtttcggatgtggccggaaccactaccgacctcgtgaaaagaagttatgaaatcccggacttcgcctccgttatctttatcgacacggcaggcatcgacgacacgggaactttgggtgaaatgcgggtggaaaaaacccggaatgctatatctcaagctgatatggccctactcgtgatcacggataaccgttttgaagaacccgaacaacaacttgctgaacagttaaagaaactggaaaccccgtttctagtaatccacaacaaacgtgacgaagtcgccttgattcccgatttaaaggaaaaattaacggctacctacaactgtcccgtgattgacttctccacccgggaagacaacacaaccccgatcctagatgcactgaaaagtgtatggaaaaaagacaacgccccgaaatctttaatcggtgatttacttactcccggggacatcgtgttgctgatcaccccgattgattccgaagctcccgccgggcgactcatcctgccgcaagtacagatgatccgggatattctcgacaaccattgcatctccatcgtcttgcaaccggaagaagtcacttcctttctggaaaaaacgggtatccgcccccgtcttgcgatagccgacagtcaagtattccaaaaagtggctgccatcatctccccggagattcccctcacgagttttagcatcgttcttgcccgccacaaaggaaacttcaaggcttatctcgctgggacaccccggatcgaggaactgaaagaaggggatcgcatcctgatgctagagtcctgctctcatcacgtttcctgcgaagacatcggccgtcacaagattccccgttggttacaagaacacaccgggaagaacttccagttcgatttcatcgtcggtctagatgcgatcactcgccccatcaccgactatgccatggttatccagtgcggtggttgcatgatcaccgggaaacaattgaagaataggctccaacctgccatcgacgcgggaatacctgttagtaattatggaatgacgattgcttacctacatggaatattcgaaagggcaactaaagaac

SEQ ID NO: 363 - DNA, 4813 bp, Butyricimonas faecihominis
tctcatcatcgatatatattaaattaaaaacttatattcaaaccgacagaccaagtacgctgaatcgggtagttgaatccactgtcacccaactccacatcccagatcttaaaactggaaatcaggaaaggattatttacccgggcataaaatttcacattctgcatcttgatcttgcttaagaaatcctgcggtacattgtacgccacctctatcgaagtacaacgcaagaaactactctctctcatgaaataagtggacttccgtatctcggcattattcttccagttctcctgaggattatgcgcatcaatggattgcgtagaaagacgcggccagaaaggacgttctttcatgttgttttcgttccaatgatcatcgtaaatcgccttcagcatcgcccggtttttcacgaacggactgattttcatcgggtccataaagaacgcccgtttacccgctccttgaaaagcaaaacttaactcgaaatccttcaaattaaagaaggcactgaaaccataaatcaatcgaggggttgtcgggaaaccgatatacgtggcatcattcacgtcaatcacaccgtcaccgttcaagtcacgatagcgaatatcacccggcatcacgtcaccgccttgtcggggagagttatcaatctccgcctgatcacggaaaacaccctcggcaatgtaaccgatttgctgtgaaatttcatgtccaactttcctttgccatttcggcttattcgcagcctcttcaatatctcgatactccgccttattgtaagtaaacgtaccactcaatatcgtccagaaatccggagtaaaagcatgttgaaccttacccgacagatcaatacccctagaacgaacctctcccacgtttccgatctgcaaatactccaatccggtagatgccggcatcgtgtaacgataatctataatattgtggcgaacctcctgataaatatcggcattcaattccacgattccaccaaagaatttcgtttcaatacccaagtttgtctgttctgcaatttcccaagtaatcttgtcgttaggataagacttcaccacgggacgctgtaaaacggtaccacccggtgccgggtccatgatactcactttatccaacaagggtaaatgggcaaaccgcggggaatcaatgaccccgtcatttccaacctttccccaagaaagacggaatttcaagaacgaaaaccaacgtcccacgttgtctgccataaaacgctccttggatgcaatccatgcaccaccaaccgccgggaaaaatccccattgattgtgcttggcaaaacgttccgagccgttataaccaaaactcgcctcggcaaaatatttatccttaaacccgtaagttccacgcatggacatacccatattccggtgaggaataccgtccaatacggtttccgtattagagtacgtcgactcctgcacgttaaacacggcagtcaaactggtctgatgttcaccccacgctgccacatgcaatccccgcacctcgtaactcatttgcgtcgactgtgaactattaccatacgcttttgacaacgtccgcgatgcgttacgttcattcaatgccagcaaccgatgctttccggtctcaaaactataatcggccaatgaatatagataaggttccgtcttgtaagcattggtataatatcccgtctgattcatggacacagaagcccgtaactccaaccctttcaacaaggcagaaagattatgaatatactctgcacgagccacagccgaataacggcggcggtccttgtacccttggtgaagatccttataaggattgatcgtgttcaaatccacggctccaaaacgaaggtgtggccaaccatacgtctcgtctcccggataaagcggagcgaaatccaccggagaagcattgaacgccatgtaataagcctccgtcacgtcggcataaggcccgtgatatttatccagattggctgatgtattaatattcaagcgaattcccgcactcaaatcgatattcaggtttgcccggaaagaaaacgtgttattctcgatattacacttgaactggttcaagcggtcggtcttcaacatcccctcgtcccgcacatagttgacagaggcataatactgcaccaaccgggaaccaccccgcatattcaaccccgcacgatggttgatagaataatcctgaaacatgatatcataccaatcattagcaggatatacccaatcgggataaagcccggactccgtacgctgaatgcgctccacgctatactgtggggtggctgccgggttacgggacaacaaggcccggttatacattttcatgtaatccacgggattaacgacatctattttcttggtcggagcactcactaccatctcgtaacgaaccgaagtataaacacttccctcctgtcctttcttggtcgtgatcaaaattacaccgttagccccgcgagccccgtacatcgccgtagccgatgcgtccttcatcacgctgaaactctcgatatcctccggaaccatacgggaaaggtccaacttagacgactccaccccgtcaatcaagatcagcgggtcaacattggccgaggtttgaaaagaagtaataccccggatataaaatttcgtgttcatctcttcttccgtcaacgcaccgggaatacctcccgtctgccaaccgatcataccggcaatttttccggtaaactggctggtcaaatcactactggaagattttaaacttctagcgtccacggtcgttattgccgacaccacactctctttcttctgttctccaaacgccacgactgtcacttcctctatattctcggcagtgggattcaggtgaacgttcagtctcgtttttcccttaatcgggacaacttccggcttataaccaataaacgagaatctcaacgcatcctccggtcttgcggtaatcgtgtaacgaccctctccatccgtggctaccccttgagtggttccctggataagtaccgtcgctccgggaataggattccctttctcgtcaacaacccgaccggaaacagtcaacatggttgtttcctgtttcggccccacgagaatcttaccattcccttgctgggaacaagtcagcccagtaccttccaaacaggccttcaccgcctcgaaaaccgtgatatcatcccgtttcaaggtaatctttttcaactctttcatgacaacttcctcccggaaattgaccaagtccccactcaagcgattgatctcatgtaaagcacgcgtcagactgtactccttgaaatcaatggagataattttctgattcttctgctggctaaaaacagaggcagaagatagtaacagcgttgccaagaaaagtaaaaaaatactaaacattcttttgcaaacgcataaaagtcccaaaaagactttcggtttcgttctttttgtcataaatttgtgttattaaatttaacatgggccttgtctcgcacaaggtcgtcaaagtggagccgcctgccaaagttgctccattttgtttttatagtgggtccgtcacataaacggtatctccctcttttctaaacttcggccctccggtataagtgaaggcatctaatatggattccaacgtctcgtccttactgaaatacccgttaaacgtgtattgattccggtctttgacctggtatataaatttcacgccataccagcgctcgatctggcgagtaactacttcgatattctctttgttaaacatgaacatcccctctttccaagccataacacgatccagattaacctcccgtacacttaatttacgagcttgcacatcccaaccggcctgtttcccaggttgcaagatgacttttcgggtcgtatctgctaaaggttccacggcgaccttcccagtaaaaagcgtggcataaatatccgattcatccttatacgcctttatattgaatgacgttcccaataccctcgtccggatctcgttcgcctcgacaataaaaggacgtgccacatccggcgttacctcgaaaaaagcctctccgaccaacttcacccgtcgttcccctttcccgaaaaataccgggtattccaactcactctcggaattcaaccaaatccgggtcccgtcactcaatatcaacgaataaaaccctcccgtggaagtaatcactttattgatttctggctccaaggaaacgtcctccgctccttgccccgtattcgcatcgtaaaccaatttcgcttctgccccgacaaccaccgcggacttcagcctcaggctatccttgtgcagtccctgcatcccgactcttttcccatcgcccagcactaatatcaccttatcctgaatgatcggctcggactcgattttagcgacccgcatctctcccatcttttccgggagcggctctccagcatacttgtacacgaacagacacaccaccaacaaaacggcagccacgcttcctccccaccaggagattcgttgaagttttctctgcctgtcccgtttcgccaaggttcccaatatatcagactgcaattttccgtaatccgtcgccccgtcaaattctgctttcaaatcccgatactctttcaggctttcgtcagaaacaattctgtcataaattgtctgccgcccttttccagctttcatccaagcctcgagaacccgcttttcttcttccgtggcggtttcatacctcatctttaagataatccgagcaatttgatgactatttaattctcccattattcctattatttttactaaagacaccactaacctaggt

SEQ ID NO: 364 - DNA, 4809 bp, Butyricimonas faecihominis
ttctcgatatactccacagcctcttccaccgtacttacgacgacatacaacccatcataggccttcgacacgaatccttccttacgaatattattgataaaaaggaaaaaatactcgtaaaaatcgttcgtattaaggaaaataattggtttattatgtattccaagctgtttcaaggtaatcacttccgtgatctcttccagcgttccccatcccccgggtaaagcgataaaagcatctgctttttcacgcatcatgctctttcgttctttcatgtcgggagccacgattaattcggaaataccttctgccgaaacaccccggtccacgatgcattgcggaatgatcccggtcacctctcccccaccattcttcacggcgtcggacacctcacgcatcaacccgcaatttgttccgccatacagcaacccccatccccgtgtcacgatctctttccccaaatcagccgcggccttaaaatacacgttatcgacactctctgacgatgcacaaaacacacaaattttcatagattaaaagttacaggttgcaagttattcatttcataaaacaagttgcagattaatagtacaaacctgtaacccattaacctgcaacttggaactacattgacgcttaagcgtcaatgttagcgtatgtagcgttctgctcgataaactgtctacgaggcggcacatcgtcccccataagcatggagaaaatacggtctgcctcggcagcattctcgatcgtcacctgacgcaacgttctgccatcgggagacatcgtcgtgtcccacaactgttctgcagtcatttcaccaagacctttgtaacgctggatatgcaaactgctctctttacccgctcccatttcctgaatcaattgcaaacgctgttcttccgtccagcaatagcgttgatcctttcctttcttcacggagtaaagaggcggggttgcgatatacaagtaaccgttttcaattaccgatctcatgtaacggaaaaataacgtcatgatcaacgtggcaatgtgcgccccgtcaacgtcggcatcggccataatcacgatcttgtggtaacgtattttttccaaattaaccgctttactgtcttccgccgtaccaatcgtgatacccaaagcttggaagatcatcttgatctcctcactttcccacacgcgatgagccaacgctttctccacgttcaggattttacctctcaatggaaggatcgcctggaatttacggtcacgcccttgtttagccgtaccccctgccgagtctccctcgacaaggaatatctcgcagttctccgggttattatccgaacaatccgccaatttaccgggcaaaccggaaccggaaagcaccgtcttccgttgcacaagttcacgggctttacgggccgcgtgacgagcttgtgcggcaaggattaccttgtccacgatagcacgggcatctttcggatgttcctccagataatttgctaatgcgacacttactgcttgagccacggccgacccgacctcagtattacctaacttggtcttggtctgtccctcgaattgaggttctgccaccttcacggaaataatagctgtcagaccttcacggaaatcctccccgctaatatcaaacttcaacttgcttaacatcccggaattatctgcatacgtcttcaaggtttgcatcactccccgacggaatccggcaaggtgtgttcccccctctatcgtgttgatattattcacgtaagagtaaacattttccttgaactccgtgttgtaatgcatggccacctcgatcggaattccattcttttcggtcgtgatatgaatggtttcgtcaatcaatttctcccgggtttcatccaagtattccacgaattcactcaatcctttttccgagtagaaaacttctgacttaaactcgttcgtgtccggatcaatcgtccgtttatcagttaacgacaaacggatcccccggttcaggtaagccaactcccgcaaacgggcagctaaaatatcatatttatattctgttacataaaatatagaatcatccggcttgaaatagatcgtcgtacccgtccgatccgtctcgccaatcacttgcacatctgctaacgggaatcctttactgtactcttggcgccagattttaccttcacgataaatggttgcgaccaatttcgtggaaagtgcgttcacacaggatacacccaccccgtgaagtcccccggaaaccttgtaagaacctttatcaaatttaccaccggcatgcagaatcgtcatcacgacttccagtgccgagcgattctctttctggttcattcccgtcggaattccacgtccatcgtcagacacgctgatcgagttatcctcgttaatcgttacatcgatatttttacaatagccagccaacgcctcgtcaatcgagttatcgaccacctcgtacaccaaatgatgcaatcctttcgtattaacatctccaatatacatggacggacgcatacgaacggcctccaacccctccaacacttgaatactatcagccgaatactcgttattcgtttgctctatttcttcactcatgttctgctctaattcttcactcatatgatatatttaattgttttttcttatttcttatattcgctaaactgttcattcacagccggaatttcattccgacacaaaacatacaaatatacgaaaaattcatgtaactttagcgaaatcaagcgagattatacaagattatctttgaaacaatttccactggagaacttctcctttcacgaaaagagactcctttcggaaggcaactttctgttcgctattcattttctgcacggaagagatcagccagccggaattgtactcggcccggttgaaaaattcgatcgtgaacatataatttttcacctgcaaacaatagtactttatagattcgattttttgtagttctgccgtcccgctgtacgtcaaccaagagaaaagagtcaggtaatccggctgaatcccctttgcccaataggtcaccaacgaagtgtctgctaccatattacttgaaagttccatgaagttcaattcattattagccgggccgataaagaaaagagaatctactttcggcgtgaaagccttctcgttaaaagggctacatcccacgataacccatcggctatcgccctgttccccttgttgaacttttaatgtcaaattcacgcgttcttcctttccctttatcttgattttacaggtaagcacggcataccaatccggatcataaaaagataacagggtggaatccttcacaacctgtttcacgaattcctttacaaccggactttctaccaatttctcgtttcgttgatttactaggaattgaatcatcatttcccgatccttcattaccgtagccatcttttccaacaaaacggaatctaaattctcctgctgaaacgcatgtaccgtgtatttcccgttaaaacgctggaaaaactcgtccaacattttaacacgcatcgtcaacacgttatttatcgccctgtcatcgtcaagaccttgagctgccagagtaacgctctgtaaaccgcaaataacgagaaggatatatttatataaattcagtattttcaaggtattatatattattgtccgtgatcgaaatatcccccagttttacttcgtaatacgtgccttccggcttttgaattggaacaagtatgatctgtatgttcttttgcacgacatcggaatagggacgatcaccttctcccataaacttttggctcatggaaaccacagcctcgtacttcccatccggacgtttcttgaaattagaaatgaaaaaaacatcataaaaacggatcgtcactttatcgtacactttctcggacaagaaagcaagtttcaccaaatactgacgaacttttagtttccggggcttgggccgggatgttgaatttacctctacgatacggttttcatctgaaaatagacgtacggcattttcgactgccgcgttcttggctgttttagaagtattctgatcgttcttcaccaagacttccagataattctgtaatgactgtatcttgtttatggcctgctttttaaattcctcaccactaatctcgttcgatgggaataacttattcctgaaagtctgggcagaagtactcaaaacggccagcgtacagacgcacgtgaatagtaaaactctctttatcatagtcatatcattttgttaccactaattcggttattttcttcgcatcattcttggtcacggaaatgacctgatatacttcccccgttaaccataaatgattcaaaaactccttgggagtagaacgctgaccgataaaccggtcctccacgcagacggaatcaggtgcggcaaagtcacttaaaaccgtgttcaactgggcgggtggttgcgataaatctacatgtccggcagacacctcgcctaagtttttctggataagctctatgatctggtcattattggcaacgggagtttccggggtattaacaggatagaaataccacacagcaaaagccaccgccaacagaacaacgactaaggtagatattccggctatttttgccacgttagccccttgtttcttcccacaatagatgcaatatttatatcccggattcaaccaattatgacaagccttgcacgagtgggctccattcaacaccaaaccacattccacgcaatataacgcatcagaatcattatcatgaccacatcgagaacatttcataacactacacatttatctatat

SEQ ID NO: 365 - DNA, 4800 bp, Butyricimonas faecihominis
ctattatagtaggtctgaatgctttatttttgtacatataaagaaatgtacaattcaaggaaagaatttatgacaagttatcatttagagtcagcatgttgcgggactacttttgaggataaggagtgggagttggaatgtccccataaggatggtgcggctttgatctatgctaattatgcaaaacgtcaatttgaagtgagaaatgatctgcccggtatttacaggtatgctaactggatgcctatttgccggacgttggaaggttccggcgctcccgtgacttataagagcgaggggttggctgaatatttagggctgtctaatttgtacatcacgtttaatggctattggccggaacggaatgccatgatgaaaaccgggtcgttcaaggaatgcgaggcgtttagcgtgtgcgctcggacgaatgcttttaatgacaagatcatggtggtggcttctgccggtaatacggcgcgggctttcgggcgtgtgtgttcggagaatcatatcccgttgttgttgtgtattccggaagataatttggaggcaatttgggcggacggaccgtggaatgattgcgtgaaattggtttgctcggcttccgggtgtgattattttgatgcgattcatctttctaatattatatgcgagatggagtttttctacccggagggaggggccaagaacgtggctcgtcgtgacgggatgggaacgacggttttgtcggctgtggagaagatcgggcgtatcccggattactattttcaggccgtgggtagcggaaccggggctattgccgcttgggaggcaaataaacgttttgttgctgacgggcgtttcggttcgcatttgatgaaattgatggtttcacaaaatgctcctttctcgttgatgtacgacgcgtggaaggcgggttctcgagccttgttgccattggatgaggatgttgcccgggaacaggtgaaagagatgtgtgctaaggtgttgtccaatcgtaagccgccgtattctttgaaaggcggattgtatgatgcgttggtggcaacgggtggtgatatgctgttggtgacgaacgaggaggcgatggaagcacagaagttattcgaaaaattggaaggaattgatatagaaccggcggcaggggttgccttggcctcgttgatgcaagctgttaaagaacagcgagtggaggaggatgccgtgattatgttgaatatcacgggtggcggtgtggctcgttacaagaaagagtttaacccggtgatgcagaaacctgatctggtatttccggtaaacccggacccggagatggtgaaggcgaaggtgagagaattgatcgggaaataatagacgctataaaagccccgtgacggaagtcacggggcttttcattgtgatttttttattgaatcagcgtgaaaagattcgatttttcattatgtttgtcttgataaatggaaatttggatgacaatgggcgtgtcggatttggagatattaacagcttttcaaaaggatatgaacgaggggggaaaattactcttccaacgttattataagcctttggtgctattctccggttcaatgcttgatgattgcactttcccggaagatattgtacaggaggtgttttaccattttatcaagaataatgtttatcgacagttgtccccggaagtcttgagtacttatttgtttcgttgcgtgaaaaacgcttgtttgaacaagattcgggatcagagggaatttgcacaagcggaattactgcggtatgatgccgtggaggaagaggcgatgactgtttcacaggaattgatcgaggctattcggaaagcgatcgaggagttgccgcagaagactcgaatggtggtaatggctgttgtcgttgaagggaaaaaatacaaggagacggctgaggaattgggtgtgtccgtgaatactgtgaaaactttattgagtggtggtttgaaacaattacgccaacaattttccgatacccttttgctatttttcattttggagaaaaataatttttaaaaaactttcgaaagttattcacccatttttcaattctcgtgtttgtcttgtaaaatatgaatacaaatacgagatgatagataagaatgaaaaagagacacgaatccgagagtatctttcgggagaattaagcgagaaggaagaacgggagttcaacgagtggcttgtcggggacgtggaggctcaacgaatttttaaggagagggtgaaacagtatgatttgattcgttgggcaaagcggtgggaatatatagatgacgaggtggctcgaaaacaggtggtgggccgggtgcgtcgttatcgcttgaagataggatttgtaaggtatgctgccgtgattgccgtgatactggtgtccggggtaatggtttggaattggaaatatcggtcggtggaacctgccactttggccaccgtttctgttcccttgaccaatgtaccgattctgaaattggctgatggagaagagatcccgatttcctctcgaaacacggagattattcgttcatcccggagggttgatatccaactggttgattcggggagattggaatacgtggcaaaatcggattcgatggtcgggcaggtggaatacaatactctcgttattccccgggggtgcgagtttaatctcgtcttggcagatgggagtcgggtgtggttgaatgcggggagttcgttgaaatatcctgaaacattttcgaatagtgaacgacgggtttatttggaaggagaggcttatttcgaggtggaacatgatgggaatgccccttttatcgtgaacacgaggtccatggatttgcgcgtacttgggacgagttttaatataaaggcttatgatgacgaaaacacggttattaccactctcgtgtccgggaaaatccgacaggaattcccggaagtgggtaaggatgttacgttgaccccttcacgtcaatcgatattcgaccgtgttaccggaaagttagaaacgaaacaaaccgatgtacaagcagccctcgcttggaaagaaggtaaaattattgcgaataacgaacgtttggaagatattttccggcaattatcccgttggtatgattttaaggtggtatacactcagccctcactgaaagatgtccgcttttatcttcattccaaccggtatgcggaagtacatacaattctggaatatctccaaacaacgaaagggattcatttcacttatgctgaaaaaacaatttacgtgagtcaataaaataaggagatgccctcacatccccttacctgttagcccctcagctaacactgtattaatttaataataagctaaacaaagttatgagaaaaaaacggaaatttcaacaaacgttgagaaaaatgaaattacttgcattttttatgcttttgggtttttgtgcctgtcacgctaccattagcgctcaggaggctcgtatcgacttgaaaatgtctgatgcgacgttaagtcaagtgttcagaaatatagaacagttgacagaatatatgtttatctataaatccgaagacgtgcaatctatccagcatatcaacgtggatgtacgtcaaactatggtgcgggatgttctggagaaatgtctggaaaataccgggttgtcatttttgtttaaggagaacgtgattattattcaaaaaaagactaccgatcaagagaagaaagagaaccggattacgggtaaggtgacggatgaaaagaaggaacctttaccgggcgtgaccgtgattatcaaaggcacgaagttaggcaccgtgacggacgtggacgggaagtatacgttggcggttccggtaggaaataatgccctagtgttttcaatgattgggatgaaacaaaaagaagaggtgattggaaaacgtacacagattgatgtggtgatggaggaggagataagtgagttagaggacgtcgtggttaccgggtactatacgcaggcaaaaaatagttttaccggggctgcccggaccatcacggcagaggagttgcagatggggggaaatcaaaatatcctgacagctttacaaaatgttgatccttctttcatgaaaatagataataatctggccggttcgaacccgaacgtggttcctgaattccagatccggggagccgggagtatttccgggatcgagagtgaatacgagggaaacccgaacacgccggtatttatcgttgacgggttcgaaacgacggcagagaaggtgtatgacatggacccttaccgggtggcatctattacattgttgaaggatgcggcagcaacggcaatttacggatcgcgagcctccaatggagtcgtggttatcacgaccaatgccccggcgaacggtaagatgcaggtgagttataatgtagatgcctcgttttatattgccgatttgagtgattataacgtgtgtaatgcggtcgagaagttagaaattgaaaagttagcggggatgtacacgtctaagtctgtgaatcaacaactcacgttgaataagtggtataacgagaagttggcgaatatcgagagggggtatgacacgtactggttggataagccgttggatgccgtggccgtggctaataaacattcattacgtttggatggcggtaatgacaatatccggtatggaattgaactggggtatagtaatacaccgggagtaatgaaagaatccggtcgtcgtcgtttggctttgggaatggagttacagtatatttataagaatctgacttttaggaataatttgacttattcgaatg

SEQ ID NO: 366 - DNA, 4787 bp, Butyricimonas faecihominis
atatttgattaacatatatgttgagatagagttaacgttatgtcgactaaaacatttgtaactccctatttatcattattgtattgattttcaatatcttgaaatcgtataattttggttgaatcttcttttttttccatacattcccgccttgctttattcgattcgctcataaactccggcgcttgcgccgctttggtattatttatacaagtttatcatggcaaagaaaaaagatttaacatcggtttattttgaaatttcagtaaaagacatccacacatttgtagtaacggcaactcaaatgaacttgcaatttcacgtaaaaagtcccgagaaatatcagaaatatactcaagcgagtatattcgttgatagcctgcgagacatttattacttcggctacaacttcgcatcccaaaccgtcaagcaaaccgtaatctacagaaatgttcctacactccgatgaccattaaattaaacattgataccaatgtcaaggacattatatcagaatacttggaacgttatcagatcgcacattgttacgattgctttgatccggccaacgaacgagccactttaatctgttattgctcgaccattatggacgtgatttacgtgtcatacttggccctattctatggagggctgaaaatcaatgacttagtatattgattaacataaaataccgatatgcttgcttggtttatctatagtccccacaactcaacaaaacgcctcaaattcacatttgaggcttaaaatttagacgcaatggaaacgaattacataccgaaaatttcaatctctcctgccgggatcgccatttatagagaaatgctcccccggctaaagttctcgtgcatcactccggaagatggtaacttccccaccccggaacaatgctacaccccacctcgacagaacacccccgatggcataatgtccgtccgggcgaaaaagagaataaacaatgccatcaaatggttattattcatgtcaagagaaaagaaacaatattcacgagatcaaaaaaagtggatcaaattccgaattaccttcataaccctaaccctcgcctctgatcagcgtcaccccgatcaagaaataaagtctcgactactcaatagtatgcttaccgagatgcgccgggacttcgggatgatccactacgtgtggcgagccgagaaacaggtaaacggaaacattcacttccacatcctaacgaacgtgttcattccacattccacgttacggaagaaatggaaccgaatccaagataaactaggctacgtcaaagcctattccaaggaaatgcaatcctgccgttccttcggtgactattataataagtatatcaaccaaggctcctactcacaactcatgcgacggtacctactgggtaaagccaccaactggcacaaccccaattccaccgacatacatagcgtgaaaaaagtccggaacctccccgcctacctctcgaaatatctttgcaaggcatcccaagataattacggaaaagttgaagacatcccaaccgaacttcttgtaaacggtaaactatggggactatcaacctcgttgtcaaaactaaaaagtattcctgccatcatcacgaacgccatatccaacgagttaaacgacctgtttaccctatttcccaacaacgttcattacgatcaatatttcaccttcctccggatcgactttaaatcactcatccggcacaagtgtaccaacatcatgcgactaatatatagcacattacaaaagtttaacgtaaatactttacaattatgcgattaagcaacaactttaaattagaagaattcgagcgttcgaacactgccggacagctcggcattgacaacaccgccccacgtgaggccatcgacaacctttctcgcctctgtaccttgctactccaacccctgcgagactactacaagacgaaaatatttatcaattccggttaccgctccccggacttgaacgcccggatcggtggcgcccccaactcccaacacctgcgaggccaagccgcggacatccatttcactggcatggacaccctaccggacgtgttaaagaaatacggggtctcgtttgatcagctaatcatctaccccacgttcgtacaccttagttatgtatcagttaaagagaaccgtaaacaaataattaaacacgagtaacatggaaacaatctcgacacaatccgcaatcgaatcctaccgtatagcctgcctaacggccaacaaaggtaaaggatgcaacaacggtaaatgtaacttatcctgcgaggccgcgaaaagtttcatttcaacaattaaatcattgtctcacaatcaaaacacaaaaaaaagatgataacattagaaataatcgggaacatcggggccgatgccactataaaggacatcaacggtcagaaatacatttcgttcagcgtggccaacaccgacacctacaccacgaacaccggggaacgtaaagaaacaacaacatgggtgtcatgcttgaaaaaaggagaatcttcaatatctcaatacctcaaaaaaggtacgcaagtatttgtcagaggtagtatgtctattaatatgtatgattacaagggtcagaagactgcgggaataaatgtcaacgtccgagaaatattcttatgctcatcaagcaagaaggccgacccgtccacctcggataacaacaacaatgctccttattaaataactgagtgtatgaaaatattaataagtttcagcggtggaaaggatagccaagcttgcttaattaaagccgctcacgaatacggatcagacaaaatagaagccgttttttgtgacacaggatgggaacatccagacacatacacacatattcatgatgtatgcaaacagatggatgttaagttgagaacactaaaatcaaaatatgatttcgtgtcattggcactttataaaaaacgcttcccttcaactcgaacacgtttttgcacggatgaattgaagatgaaaccgatgattgattacgtgctttcactacatgatagttgtgttattatacaaggaattagggcgggagaaagtcatactcgtgcagctatggagccggagtgtatgtacttccagtcttattttcaagcaaataaaagcggaagaaaagagtcatacagaggaaaagaggttcgggaatggtgtaagcaatacgatgcttctgttttaagaccaatttttacatggacagcacaagaggttatagactgcatattgaacgctgggcaacagccgaatcctctttattcacgaggatactcccgtgttggttgtttcccgtgtatcatgtgtcggcacagggaaatgataaatatattaaaggatgaatctatgaaacaacgactgatccgtgtagaagaattagtaaaaaagtgccatccttcggaacctactttcttttcaacaggatatatacccaattgggcttgcacgaacaaatcacatcccacggtggaagatgtatttaaatatctttccgataaaaattccacccttgatatgtttaagccggaaggcgggtatagttgcatgagcctatatcacggattatgcgagtaacgtaaaatgataacaacttaaactgcctcccactccaaaagtggggggtctttttatgcccattttaaaaatcaaaattatttgtatatttgcaccgaactacatactaagaggcggcaacgtccgtgacatcacgggaaaaatcattccccgtgatcattatacggtttcgtacccccgtgtggtgcgttaatgcgcccactgcctcttaggtgtagttcaacgggaaaggcggaaccgctttttttctgcccaaataaatacaagcgtgatggaacaacccgacataaaagacctcgaaaacgaaattcacgaactagctcttaatttacacgattctttcgaatacgaaaatgaattattcaaaatgtcgatacttgcatcaacaaacctaacactagccatgcagaaacacaataagatcgaactaaaactaaacaaggctcgcgaacaaacgctaaaaatactcgaacgatatataaatgcactcgactccttaaaatcgcaaaaggaataattcccaccccccgctcgcgtggccatccgtggcggctcgctgccgctcgctgatcgccactccacacctacccaccggaacccgaccaagtaacctacttgtctccacgctccaccccttactgcgtgggtcgctcgatgtctcggaaagacagcgacccgggaccccgcccgccccatcactcgacgaatgtccccgtctcactaacgtaataaaaaacagtaatcatccccccttctcgcatgcttttttaggtcgctgggtgtttacggctccctaaagcatgcgcccaccgcacacgaaacggcaaaagccatttcgtaaataaatgttcccgtaacttgcaccatcccacgccccaccgctccgggacacgccctaagtcgcaagctccaagggcgtgtttatatgtcccgtgagcggtgggcccatcctagctcgctacacttcaacatcccggtaatcaaggcaaaaaatccaacccgccccacgcacataaaacttataacataatcgggcgccagttatagccccttcgggctacgggcctccggccgctataaccccgactatgttaaagattcgcccacgcaccccggtaccccgtggcaacatcccggaaacccaccccacccgtcgagcaatccccacgc

SEQ ID NO: 367 - DNA, 4779 bp, Butyricimonas faecihominis
aaatgaggatgtaggtttattttactggaaaagtagaataaaaaaaatgttattgcttatgaagctgatttgtttttggattctagtcgggttgatgcaagtgcatgcaaccgcttatggtcaggccgagagtgtggctttcgagaagaagagtctgacgattgatcaagtgtttagtacgataaccacgcagttgaaatacgacattttctacagcgatgatgagattgacgtggctaaggtggttcggctcccaaatttaacagtgaatgtggaagacgttttgcgtttggttcttggagaacattttacctatcaatttgtcggtaagactatcgtgatagccccaaaaactgaaatcccgcagaatcaaaagggacttcaacttagaggttttgtatcagacacgaaaaaacaacctatgccgggcgtgacggttaagttagttggaacttctatcgggactgcaactaacatggacggatggtttcaattgccggatattcctgcgaatgcgggaactttagagttttcttttgttggttataaatcgcaaaaagtaaattttacagccaacacgagagatactttacggattgtgatggaagaagatgttacagaagttgatgaggtcgtggttaccggtatgtttacgcgcaaagcgaatagttttaccggtgcagcccaatcgttttctcgggaggaaattcgtcgggtaggaaatacgaatgtattgcagagtatcaagaatcttgatccctcctttcgtatcgcagaaagtcttgcgaacggttcgaatccgaatcagcaatacgagatcacgatgcgtgggcagtccggtttcccagatttgaaaggagaatattcatcgaatcctaataatccgttatttattgttgacggttttgagcaatcgctaacttatgtgatggatatggatatgaatcgtgtggctagcgtgacacttttgaaagatgctgcggccaaggccatatacggatcgaaagctgccaatggggtggtagttattgaaacgttacagccggaaaagggaaaattgagagtgagttacacgggcacaatgaacgttcaacttccagatttgaccagttatgatctttgtaatgcagcagaaaagttggaagtagaattcaatgcagggaaatatacctatttcagggataacggttcgtctatatggggaaatccggttgaacaatattcatgggatcaggtctataacggactgatgaaagaggtaattgccggggttaataccgattggaagtcgataccgttacgaaatggtatcgggcagaaacatgctatctaccttgaaggaggggatgattttttccggtatggtctggatgtttcatataataatgtggttggtgtgatgaaaggttctaatcggaacacgttttctggaggtgtgacactttcataccggtataataatatcatgctaaagaatagtttttcagtaacctataataagggagagaattctccgtatggttcatttagtgaatatacctcgatgaatccttattatcgttgttgggatgatgatggtaacgttataaaaatacttggagaacgtcttggtacatatcaaaatacgaatgtttataatcctgtatggaacgccacgatcaacacgaaggatttttccgaatacacgcagtttgtaaataatttctacgtggaatggacgcctgcacgaggatttaaatttaccggacgggtgagtttgaacaagagcgatacgggtagtgaaatatttcatcctgcatcacacacggattttatcggttgggaagaggatgaagaaaagatttatcgacgcggtagctatatctatggtgacggaaaatcttttgcggtgtcagcagacgtgctggcaaactattccgtgcagctaggtgaaagacacatgatttttgctaacgtgggatggagtttgaataattctacatcggagtcggtgacctttaaagcagaaggattttctaatgataaacttgataatttagcttttgcacgacagtattataaagatggacgtccctcagcctccgaatctactactcgtgatattggttttgtcggtgctgcgaactactcttacgataatcgatatctttttgatgcgtcgtttcgtttgtccggttcatctcaattcggtagtgataatcgttggggtacattctggtcgttaggtttaggatggaatctgcatcaagaaaaattctttcattcattgacggattcaggtatcctttcacagttgaaacttcgtggttctttgggatacacgggttcacaaaatttcaattcgtaccagtcgattgcaacttattcctactacacgtccagtgcttacaacggtaatatcggagctgtcttggctgggatgcctaattctcgtttgaagtggcaaagaaaatatgatcggaatctcggggttgattttggtgtgtttaacgggaggttacaggggcgttttgattactattcgacagttacagacgatttattaaccgatgtaacgattccttcttctactggatttacttcatataaagagaatttgggaaaagtggagaatattggttatgaaatcagtcttaaataccgggtttggcaggagcagtcgaaggatgctttcctgaatatatttgtggccgcatcacataataaaaatacgatcaaacagatttctaactttttgcagacgtataacgatacccaaacgtcctctgtttccaataaaccgattactcgttatgaggaagggcagtctatgtcagcgatttgggcggtgaaatcgatgggaatcgatcccgcgtgtggagatgaactttttataacatcggagggaacacgcacgtatgaatgggattccgataatcttcagatttgtggggatacagaaccgacacttcaagggaatcttggatttaattttgattacaagggaattagtttgaatgtgactgcccgttatcagttcggaggacaagtgtataaccagacattggttgataaggtagaaaatgcgaacttggaaaacaatgttgatcgtcgaatcttttctgatcgttgggtaaagaagggagacgtgagtttgtataaaaatataaagaatgaagagacgactcaagcaacttcccgctttgtcgaggatgatgatcagtttgtgatttcatctcttaatctttcttacgagttgacgagaattgaagcgattaaacgtatcgggatggaacgtcttcgactttcgtttgatatggctgatttcggacgaatgcagtccgtgaaaatagaacgaggaacttcctatccgtttgcacgtacgttctcgttttcgcttcaggtaatgttttaattaaaaccgcatgacaatgaaaacaataaaaattattctttcttttatcatcatctcgcttttctctatttcatgcgatgattggcttgatgtgaaacctaaaactcaggttgagtcatcggagttactgaaagatgaagccggttataaagatgctctttggggtgtttacacgttgatggtacagaaatcaatgtacgggttaaacatgacggtgtcattggatgccatggcaaaaatttattcccgtgtcgggacgtcggctactcaatatcctctcagtacgtatagttatacgagtacgaaggctaaatcattgattaacgatgtttggcaaaagacttacacgacaatagctaacgtgaataatatcattggtaatattcaagaggcagatccggcaatgttttcaaaagacaattataatgttatttatggagaggctttgggtttgagggcatttcttcattttgatttgctgaggctttttgctcctgcgtatgcagatgatcctgaagcccaagggattccttacgtggatcattttgattacaatatcacggaggtacagactgtcagcaagacgatagatcttatattgaaagatttggaagatgctgcaactcttttgaaagtggcggatccgctttgtaccggacgaacgatcacgacttccgatgataatggttatttgcttgatcgtacgtttagatttaattattatgccgtggtggcgacgatggcaagggtgtatatgtggaagggggataaggttaatgcggcattaaaagcaaaagaggttatttcggatagtggttgtaagtggacttcgattgatgacattgcaatagccgaggaaaagcgggatcatacatttactccggagcatattttcagattaagggttgaggagatggaaaagaatattgaatatacgttctcaacaataatggcatgggctaccgggtattcattttcagtgatggatcgggatgcggcaataatttatccgcatacgacagactggcgcggttggaatactcgttacggatggagtgagaatttgggacttaattcttcctctatttatcgtttgccgaataagttttggcaatatgaggatatgcctgccgagttcaaaaatttgatgccgatcatccggttcccagaaatgaaactgattgtggctgaatgtaatcctaccactgaaggtgctgagattattaatgaaatacgttctcaccggggaattacggaagaatttttagcaacctcaactgaaacacaggtgttggatgagattttaaacgagtatcgtcgggagttttatggcgaaggactcatgtggtattattataaaaggctgaataagaaaagtattcctt

SEQ ID NO: 368 - DNA, 4763 bp, Butyricimonas faecihominis
tataaagactatgaatttactggaagggaaattactggcagaaggccaacgaattggtatcgttgcaggacgttttaacgagtttatcacgagtaaattgttgggtggagcgttggatgctttcaaacgtcatggcggagatgaggcaaatattgacttggcttgggttccgggtgcttttgaaattccgttagtggctaagaagatggccgagacgaaaaagtatgatgccgttgtttgcttgggtgccgtgattcgtggggcaactcctcatttcgatatggtggctaacgaggcaaccaaggggattgctaatgtcgggttgcaaacgggaaccccgattatcttcggtgtcctgactaccgacacgatcgaacaagctgttgaaagagccggaacaaaagccggaaataaaggtttcgaggcggtaactacggctatcgaaatgattaatttgttgaaacagatttgatttttacaaattggaaagaggttaccgtctcggatttaatccgagacggttttttagtttttgggtcactcatatatttaagagttctctaatttcatcgatggtgtatgttttcacgtcaccattttggactgatgccatataaatagtaaaattgctcttgtttattatttttgtcccttttctatgggcattctaacggataaatatcccaattctcagctggttgacaggctgttgggcgactgttaggcgccatcgcccgattgtcgcccgatcatcgcccgattatcgccgccattttaacaggatataagtaaaaataacattgtcgggattcggacgatggaaagcaatcgggtggcaacaggggagcaacgataaattttcgtggctacgttgccataggaatttccatagattagggtatatagttgcattttgatgaatttattctcatgttgctgtttgctttgtttaaaaatgttgtatatttgtggcgtacgtcataatcagcgaagtagtggatctgcttcaatttcagtggcaggcattttttttgcctgctgctgttgccgatattcggttccgcacccccgtggagtgcattaatgtgcctccggcttcgctgaagtgacgtacaacgggtcaggcgggaccgttctttttggaatacccgtctaaattaatacatattattatggaagaagatgtaagccgtgtgtctgcggtagacatggaagcacccgggcgggtagccaatcagttatcaattgaggagaaacaaaaattgatggagtattactcgaaacaactcgaaatgatgtatccgattgcgtcaccgagaatgacggataaagcgggacttgtgactctccagaaaagaaacacgagattgattgaaatgttgacattattcgatcgttcatgggcagatgaaatttcggtgattcaaaaagctgttctgcaatatttggctaccgagggtatttctaaaaaggagcggttacggattgtagaagtatggggcgattggactacttttttgttagataattctcgctttcgggtgttgcttggtcgatttttacaatatcatcagcgtcaagcgtgtgaattgaatgagttattgaaaacggagaatatgtcgttgaacatagacggacaatcaattaataatcaggattatggggaatagtgattttatcccagcatcgaatgtgtcggaaaaatttacaggtgatgaatgtctttccgattccttaaccgagaatcgtttttaccgacaaatagtcgaggatcttaaaaaatgtaacgtggatttggtttctgaagatccgttggaaacgatctataattgtatttgtcatctcaataatcttttccgggtacttcgtcgtccatggagtatcgagtgtggaaaaatacaaaaagcttgtgcctattatgtcgctaacgctaaacagtcaaagcaagagaatgaggctgttattgatgcgtcaaatggctttatatcttcgatctgttatttcacggaatggtatgattttatctgtcagatgcaacaattcctttgtcatcaggaaaaagaactgaagcgggtgtttaagcaacagaagcaaaaagttgtcagtaatgataaacctgccatggaagccacgacttattgtatgaccgtggggaatagtgaaatctacggtgtgacgtacgagcaactcgaagaactttacaagacggtcggtttattcatcaagcgagaaaaagctccttttgattgcaatattaaagggtataacagatatccgattagtattgataagagtataaattttgatgcacgtaaggaagtgttttttgttgaatatggtcttgacacgtttgaatccagtttgaattgtatgtcggcagatcaattgaaaagggtggcggatattatttatgaattcttgaaaatgtatggagaaaatggagatcggaaggtttgttgggatgttgcggattattctcctgttgtgtctggtcgggaaatttattttagagtgaatgaagattcccgagcttcacatttcatgacaccaccttatgttcgaaagcgtattgataaggtggaagatcggggagtagagatcagttacgatattgatgtgaacgaattggaatctgtaaatttgtcttttgaggaattcatatcgttttatcgacaattggggagttttttgaattagtgagtctataaaacgaggctgtccaaaaagtcatttttcaaactccctcccggcttcgccgtactccctctataaacagagggagagttgaaatgctccctttcttcgggaagagtcaccagctcctcctctgtttatagaggaggtggcacgaagtgacggaggagttttttgaaataaaatgactttttggacagcctcgttaatgttatttgtagtaccttatttctttttcggcatttgtttcatccgttgttcctgcatccgttgcatttcttccaatttctgttggaatttggatttcttcacgggttttgttttggcgagttctatttgtttcaacaatttctcgtcgtttacgaatttccggatagcccaagtctgaacaatcgtgatcaacgtggcgatgaagtagtagtaactcaaaccggatgaatagctgttgaagatgaacaggaacatgatcggcatgatgtacatcatcgtctgcattcctttcatctggtcattctgcggttggttcttactattgtaccacatgtacaagatgttcgtgatcgtcattaacaaacagaacaggctgacatggttcccgtagaacggaatggtgaagggcagcgtggcgatggaatcgtatgatgccaagtcggtggcccacaggaaactcttctggcgcagttcgatggctccggggaagaagtagaagagggcaatcaagatcggcatctgcaaaagcatcggtaaacatcctcccatggggttcactcctgcctttttgtacaatttcatgacggcttgctggcgctccatggccttgtctgcagggattttcttgttgatctcgtcaatttgcggtttcaaaactcgcatcttggcctgtgacatatacgatttgtaagtcagcgggaaaagaacaagtttaatgatcagggtcaacagtaaaatgataagaccgtagttcaaggtcacgtgcgattccaagaagttgaagattggaattacgacgtaacggttaaaccaagcgatccatttccaacccaagttaatcaactggggaagttcaatatctttgccgtattctcttaggaccggataggagttcggaccgaaaaagaaacgcatatcgtatttttcaatggctttcccggagtaaggtaatgaaatttcagcatctgccgttttcaaaaagcccgggttcgtgttgttggccgtggagaccaacacgttcgggaatgactcttttgcgataagtacggaggaaaagaattgttgtttgtaagccacccatttcacgctcgtaggcaagtctactttctcgtctccagtcagggaaagatgctctacatcattgtttgagaagttatagtataccccggtataacggctttcaaagtctctacttttttcaagttgaggcatatccactccccagtatagcgtgaggaagttcgtgttcgaggcaataacgtcattcagattgtacgtgttgatgttgaaatcaaccatgtaagaatccggggctaatttgtactcgaattcgaggtatttattttcgtccacgtaagcccgcatcgtaagcacttgttcggccgcctcggcattcagttctttttgactcgtgttgggaacgaaaatcagatctgccgtgttaatttgcttgttccgggcgtagaagttcaggcccatggaactcttgtggtctttccacagaatcaacgggagagagtcgtgtgtgcgatatcctttcaagtccacgtagtcaatgcatccccctttggtgttgatgtgtaatttgattttgttgttttctagagtgtattgttctaccggcagtgaatcttgtttgaatatggcctctgttccggcttgctgtgcttctgtattttgttgttgtgctgcaaaatctgcctgacgttctttctccaatgcagcggcccgttgggcttcaacccgtgcaatggagtcccggacatgcatggctttcagttcctctttggaaggactcatgaaataagagtagccgattagtatgagcgcgatgactactaaaccggttattgtatttc

SEQ ID NO: 369 - DNA, 4745 bp, Butyricimonas faecihominis
atccaatatagatttatttgtgcaaatgtaaatcttttttgaaaataatcacttttctacggtagtttttcctgtttcagtttatatatgtgtaaaaagatatagatatgaaaactgaaaaagatatagaagaaatgctggataacgtgaaaatcccttcggatgaagaggttgaggccgcgggggtgcgattcgatcggcggctgcgtcgtgtgagaatgcgccgtcggatcatttggagcgggagttccgtggcggcggtgctgtgttgtgggctcgtgtttgcctcgttgtgggtacgtgaaaaggaagaggtgcctgaggtgacaaaagtggtcagcgtgatcaagatggatcacgattttgccgtgccgacattgattctggcggacgggaatagtttgaatctgaaagggaaaaagatggattccgttgttcagaaatcgaacattcagattgcgaataaccatatcatgtatgatacggcaaggactgctcgtgaaattgcgtacaacactctgatcatccctgccgggttcacgtataacgtgacgcttgctgatgggacggaagtaaccctaaatgccgggagtcgtttgaaatacccggaagagtttgtcggggatttgcgggaggtggaattgtcgggggaggcttattttaatgtgacgaagtcggggcaaccgttcgtggtaaatattgacggttctaaaatccgggtttacgggacccggtttaacgtgaagggacgttctcaaaagacagtcgagaccgtgttgatcgaggggaagattggttttaaatctcccggtcgtgatgagattcaagtcattcccggagaacaggtcgcttataacgtggggtccggtgatattaaagtggaacgtgtggacgtgcaatatgccatggcgtggctgaataacgtgttccgctatcgggacaagcctttggatctcgtgctggaagatatttcaacttggtacggggtcgagtttgaagcccggacggaactggcccggattgaaataaccatgaatttgagtaaagagactccgattgacgaggtgattcaattccttgaagaaatgacggattgtaaatttataaaagaaagggggcattacatcgtgaagtaaaaaacaacaagtaaaaaaattatcccgctaggcaggataatttagggtaaaatcgctatcgtataaaattgagcctttatccatagcgaccatcaaacagtaaagtgaatttactatttaattaaataagtacgacaaatttatgcaaaaaaatcacatgggcggtatctctatcgctaaaaaaattgtgttgtatatattcttggtatttacaacactaggagctatacctagggacacgtacggggcgacatcttgtgtgtttcaggtcatccagaagaaagtaaccatttcgatgaaaaatgccacgctggaaaccattcttgccgaaattaaccgccagacgggtattgattacggtttccaaagtaacggggcggtagataaaaaccgacacttcaccttggaagtgaaggatgtctccgtggacgaggccttgaagacgttgttgaaagacagtccatacgattatgtactcgaaaaaaatcgggtcgtgatcgtggttaaggaggcaaaaccggtacagttggtagcagtgaccgggcgggttgtggatgaaaaagggaatcccattcccggagctacggtgcttatccaaggaacaactcaaggagtggccacggatgccgagggacgttacacgatcaatacccggccggaggatgccttgcggatttccttcattggttacaagacagaggtagtgccgctcaaagggaaaacgaaattaaacgttcgtttgaatcccacggccgagaatatcgaggaggtaaccgttgtggctttcggagagcaaaagaaagagagtgtggtttcggctattaccaccgtggatgcgagaaccttgaaatcttcaagtagtgacttgacttcccagtttgccggaaaaattgccggtatcgtgggatggcagacgggaggtattcccggtgcgttgacggaagaagaaatgaataccaaattctacattcgtggtattacttcctttcaatccaaagccaatatcgatcccttaattttgattgatggggtggaatcgtccaagctggatctttcccgtatgacaccggaagacatcgagactttcagtgtgatgaaagatgcatcggcaactgccatgtacggggctcgtggggcaaacggggtaatcttgattacctccaaaaaaggacaggaaggtagtgtttacacctctgttcgttacgaggcggtattgagtatgccgacaagggagatcgaggtggtagaccccatcaattacatgaagatgtacaatcaggcgttgttggctcgtaacccggatgccaccccgcaatacagcgtggaacgcatcgaacgcacgggttctccttcatatccttcttgggtgtatccggcgaatgactggtacgacatcatgttccacaattactccattaatcaccgtgccggtttgaatatccggggtggttcccggttggttcaatattacacgtccgtgaattacgtccgtgatgaggggatgttaaaaactgatcgtctgaaccagttcaagtgtaatatcgagaatagcacgttctctttccgtacgaatctgaatatcgacttgagtgccggaattcgtttgaatattaacacttcagcgaacttggataaatatcgcggtccttatgctgatgtatcgcaggcatattacttggcttttaatgcctctccggtggattttgccccgacttatccggcggacgagtcatccaattggccgcatcttcgtttcggtgcggtggatcaaagcactgtcaatccttatttgatattgcatcagggatataaggatcgtcgtcgctattcggctgttgcccgtgcggagtatattcacaatctttctactcttctcaaaggtttggagttacgggcttcggtttccatgaaccaaaccgggtactatgcgaatgcttataagacaaccccttatatgtattctctgaagaattatgattttgaaactggagtacatcagttgaatgctttgaatagtagtgaggcatcaaggacattggcgaaagataatgatgataagcataccaatagttctcaatctacgcagatgagttacgaggtacgggggctgcatgtggcagcttggggagaacatcagaccagtctgaccgttgtgtttaatttgcaggaaactactacttctcaaacagcatctgtgctagatggtattccaaaccggaatatgggcgtgtccatgcgcggaacttatggatggagggacaaatattttgcagaggccagtttcgggtataacggttccgaacgttttgccaaagatcatcagttcggtttcttccctgcgttaggggcagcttggattgcatccaaagagaaatttcttgccgaccacacggctcattggctctctttcttgaaattccgtttctcgtggggtaaggtcggaaatgacggtgttatcaaggacccgcgttttacccatttacctttattgaaaaatgacagtgcgttagatccctccccaagtgggaataatatatcaaggccttttgtggcttcttatcctaatgagaagctcacgtgggaaattgctgaacagagtaatatcggtatcgagaccaaattttttggaggaatcgtggagcttaatgccgatatttatcaggaaattcgccataatatcttggactatcgctatacgatgccatcaactaccggtttggaacaaccgcaaattggaaacgtgggcaaggctcgctctcggggtattgacctctcgggtaaggtgcaacatgcctttaccccggatctttggatgatcttgaatggtacgttcacgtatagcaaggctacttacaggaagatcgaggaagcaactagtaaaccggcatggcagcggagagagggacatgaactgtcacaacagatcggttatattgccgaaggtcttttccgcgatcaggcggagatcaataattcgcctacccaaggaggtgatatcatgccgggagacatccgctaccgtgatataaacaaggatggagtgatcgatgtgaacgatgccacgtacatcgggttcccgacaactccccgtgtgatttacgggtttagcggattctttaacttcaagaatatcgagtttagttttgctttccaaggatccgggaaacgggctttctttatgaatccccaaaagattagtccgtttgaggaaaaccgggctatgctgaaagcgatttatgatgatcactggagtgccgataacatgaaggaacgtcctttctggccgcgtctttccacacaatcgatcatcgtgcataatccacaggaagagtggggaggatcggaacaacggaggtctacctattttatgcgggagtgtagtttcttgcgttgtacttctattgaattggcttacaatcttccgcgggagttcctgcaaaggttgagaatgcaaacggtgaaattctatgcccgtgtcaataatcccttcttgatcacgaacttcaaggtatgggacgtggagttgggggacaatggttttaattatccgattcagcgtacatggtcgatcgggttgaacctaagtttctaatttaaacatatatgtag

SEQ ID NO: 370 - DNA, 4710 bp, Butyricimonas faecihominis
ctacaagttcaatcaaaaatatataccttcattagcttattccactgtcacatttacccagaatttactgaattcttccaaatcgattttcaggtaattcttgtaatattcaagagtcagattatatctttcttgtacaagaggataagtatccaatatatcttgtcgttcttcaaggggtgtacaaacaatccacgtcgcatagcttgccatgtcttcattgggagaatacttacttgacagcataaaaaatgcgtagggatccacaaaacccaaacttctcagataatccatattccattcttccgtttcccaatcaaccatatccatcattgcctcatcctgttcctcgtaagacatttcgttaaaatacttgcctttcgaaacctgaataaaagcatcaggagaaggcatatctaaagtaaaataagtcgatgttcttgttctgaagaaactacttgcaatactgtatttccacaattccggttgaggcccaagatcatcatccatctccccccagtaaacaattccttgctgagcttcatcaatataaccgatacttaaattcggcgtcggcaacattaacccgtaataaccgacatactcacccaaattatcataccaaagatttttctttatcaatacctgacgttttattaccgttgtcttcactatttctgcaggtaatgcattataaaatgtacgcaataatttcaggaacgacccagcagtcacctcatccgcagcctccaagggaagtgcctccggagtattatactcgatcatattcgtttgtgttatccccacattcgtgcgtaaggcttcatccccacttaaagtatagtacacgtgatgatcatatttctggtacaaatcataacaaattttctgggcctctgaagtcccgtcaacaatggccggaattggtccgttataagtaaattcaggagttaaactactttcatgacaggccgaaccaataaccaaccagccgaccagtactaatattccatatattgttttcatatttatcagtttatctagggttagcaccaatttctggatttacattcagttccttttgaggaatttgcaagacgtaacgaggatcatccttttccaatgttgaacttccggtaatcccgtaatgtgtaattgaaggacgagttgtacgccggaggtcaaaccaccgctgttcttcgaaacaaaattcccgccttctctctgtccagatcgtctccaacaaggtctgttgattaaaatcttccggatcaagtcgtcccgtcgtttcaaaatcttgagcccggaatttcacctcacgtaatgtatttaaatatccgactgccatcttgataccatccgtcttgtgagcataagcctctgcaagaattaaatacatatcttctgttcggagaacacgagtatatccatactctgaactcaactgcacaacaaagtctagataatttaatctataatacctgtttttcatgtagcgaattcgtccccgggtattcctacgcataaaataatatctacgtacatctcccggttcataagaattgaacaacgtttcactcggataaaaaacagtttgagcattatcaccacttaaaatcctgtaaacctcattgattccattcacaaacagaacgtttgagtttttctcactcaaatagcctataccgggaacattatctgcagtccaatacgccaagggagattccgtgtaaatcacaggattctctcccgcctccctcaaatcgaacaatgccggattagcttttatcacctcttgcgcttgtgctattgcaagatcccattcttgcatatataaatatacttttgccaacagcgccttagctgcaatggcagaaaaacgagttttaccattatttatcggattttcttccaataaaggaatcgctttttccaagtctccaacaatctgttcgtacacaacttttaacgaagaacggcgataaaccttatcatccgccgtgatttccaaattaatcggaataccgggagccgtttcacaagttgccggatcgtatggagatgcatacatatttaccaaataaaaataacggaaagcccgtaaagcataagcttcccctttaatgtggttacgagtctgacgaacgactgtttcgtccaacacatccccgacagcatgatcaatattctcgatcacaacgttcgtgttaaagatgctattataaaaattttcgaaagcctcatctccattaggcatagtcgtttcaatactattatcccacaagtgagcccccaaataagtatcagaactattcgcaaatcccggatcacgatccgcagcaatataatccatatcatccgttagaacatctatatacggaagtacaactttagtcaaatacgcattattcaataattgatcataatcatctgttgtagatagtttctgcttgttttgcggtatttcatccaaataaccattacatgccccaaggacaagacacaggcccacgatcagcaaattatataaatatttcttttccataatccttcatttaaaaattgacattcaagcccaaagtaaacgtcctagccaacggcaaagaaccataagatgttgtcgtataattaatcgtctcaggatcataccctttcaaacgtttgtccgcaatcacgaataaattctgagcttgaaatttcaaagtaacacttcccaatttacgatctccaatagctactttattcacccaatgaacaggtaattgatattcaatcatcaggtttctaaaacggagataatcaccgggaactaccgtttggtctgataaattataccaatctgtcgcaaagaaattaccatcagccgtcgtgatatatccatcacccaaagataaagccgggatcgttttacccgtattatcttgtcccggacaccagcgatcttttatactactattcacattttcatcagccgatggagcggatacatacgcacgagccggtaaacgcaccacgttcttcaacccgaaagcgaacaacattgacaaggaaacgtttttatatgacactctggtattcaaccctccggagaacatcgggtcacgagttccttcatatttcaaattcgccaaatcataagggaagttcacaatttcctcactatccacgccaagtaccttcccatccttatcatagaacatgggcatacctttttcatccagtttggcaaaacggtacgagaacattccattcacaggtttcccttcatatacttcacccggcgtataaacactttgtactagatatttagtctgtgcggtactcttggatttcgtcaccttattcttaacatatcccatgttgaaagcggcagtccatctccaatccttatttttcaaaagagttccacttaaagagacatcaatcccttggttacgcacatcggcataattgacatattttcccgtaaaaccagaaacggacgaaacactcttgtaagcaatcaagtctttactttcatccaaataataatcaacatccaaagtcaagcaatcgtcaaataaccccaattccaaacccacgttaaatgaagccgtcgtttcccatttcaaatcaggattaggagcctgttgaatttccatctcgaacaaaccagtcaccgcattaggtggtaaagccgcagcaatgatcgatgggttactatcctccacgatattacctcttaaaccgtaagaagctcgaagtgccaaattacttaggatctcgttatccgataggaatgattcattgctgataatccatcttccggaaacagaccataaaggcaagtaacgatatttaggattagagccgaaaagattcgatccgtcaaaacgaatattggcattcaacacgtagcgatcaccatacatggctgaaatcacaccataataagatatattagaacgatcaaccagactacgagtcactttgtttcgttgtaaattccccgtactctctcccaaagcgggttcataaaatgtatttccccggtcatggaaatacccgtaattatttgattttaaacccttataatttgtatttctgaattcttgccctaacaacacatcaatagacaaatcttctgtcaggcttcccttgtatgttaatccgttacgaattaatgaagagcgctgttcgtaagttgtctcattatacacaccaccataaggcatcggagatttttctatatcctcttccgatccttctccataattgtaccctctaatatctgctacataagcacttttttcagtagcataatctcgggctgttgaatgagaagaagaataactaaacaacccctcgtattttaatcccttgtacaaattcacattcaaactgacaattccttttaggtctgtctgggtactctcgtttccggtatttgccagctcgttcaatatattaaatttataagcccgaccacttaccgtactctgataataatgcaaatcaccactttcttcccataaagggatagctcttgaagaacgaacggcataattgaacaggtcaatagaagaatgatacatttcccagtcccgacgatcaacctgaagtatagcccccatattcacaccttggaaaagttccgtattcacctttaccattccaccataatttttgtactcgctagccttgtcgacgccctcttctccattataattc

SEQ ID NO: 371 - DNA, 4709 bp, Butyricimonas faecihominis
ctatgaaaacggggaagtgataaagtaaagattacaagatggaaatagaaaaagcggtaatatttttgcaaatattgccgcttttttcaataataataattaagtttgtgcatagtataaaatgcaacgactatgacggaagtaagtgaattagtagctctcttgagcaaggcggaaagagggtacaccaaagttttaaatcgcagtttccagaatgccgggtatgatcttagccgggagcaatatgaacttctggaagtgttatgggaacaggatcatgtgaaccagcagaacatttccaaacgtctccagaaggataaatacaatgtcacaaaactattgaacaccttgcaaaaaagaggttacgtgcaacgaaagatggacaaagaagacaaacggagtaatttcgtggtactaactgaaaaaggggtagaatcccgtcatacgttgcgccagatcgtggaacaagtccacacggatataagttttaccttatctccgcaagagttgaagtccgcgatatgggtgttgaaaaagttgaatttgcaatagatcgcctacggcgagttgtaggttgcgagttaacaggttacaggttgaaattataaatctaaaattgtaaatcataaattgttatgggagtttttgaaggattaaaaccagaagcagtttggggatattttgaagaaatatgtcaggttcccagaccgtcaaagaaagaaggtaaaattatcgcttatttattggattgggcgaagaaacacaatctggaggcgaaacgggatgatgcaggtaacgtgttgattaaaaagcctgcgaccaaaggaaaagagaatgcaccgaccgtgattttgcaggctcacatggatatggtttgtgagaagaattcagatacggtacatgattttgataaagacccgatacaaccctacgtggatggagaatgggtacgtgctaaaggaacaactcttggtgctgatgatgggattggtatggcggctcagatggccgtgttgacttctaccgatatcgcacacggaccgatcgaatgtttgtttaccgtggatgaagagaccggattaacgggtgcttttgccctgcaaccgggattcctgagcggaaatatacttttgaatttggactcggaggatgaaggagagatgtttatcggttgtgccggaggtatcgacaccgtgattaacatggggtataagaccgagaaaactccggcagaatcatttgccgtgaaggtacaggtgaaagggcttcaaggaggacattccggtgatgatattaataaaggtaggggaaatgccatcaagattctgaaccgtttcttgtgggatttgaatgcaaaatacggaattcgtgtttccgtgtttgaaggaggtaatctgcggaatgctatcgcccgtgaatcttttgcggtgatcacgttccccgagcagtacaaggaaaacgtgagggtagactttaatatatatagtgcggaaatggaaaacgtgtggaaaatcacggaacccggtttgcagttagcattagagtctacggatgtgccggaaaacgtgttgacaaaagaaagtacggatgcacttgtaaacgcattgtacgcttgtcctcacggggttttctccatgagttaccgtatgccgggattggttgaaacatcaacaaatctggctgcagtcagattcaacgaacccaataatatcttgatcaccacttcacaacggagtgacgtgaattcggaaaaattcaatattgccaacatggtagaatccgtgttcacgctggcaggagccaaggttgagcatggagaagggtacccggggtgggctccgaatccggattccccggtagtaaaagttgccgtggattcttacaaacgtctgttcggtaacgaaccgatcgtacggtctatccatgccggattggagtgcggtttgttcttggagaaatacccgaacatggacatggtttctttcggaccgacactgagaggtgttcactccccggatgaaaaaatcaatatcaagacggtacagatgtggtggagccacttggtggatatattacaaaacctgtaaaaaatttgaaagttcataaggtttataaagtttgtaaagtggagaatgattccttgattttatactcttaaaaccttatgaactttacgaaccttataaactttataaacattcattttatggagacttcaagaaaactggcaaaatacgatcggttgtatgaccagatcaaacaatatatccagaccacggaagatatatgggcccggttggcgacaatggaggccgtgttgcatcacaaaatgcagtcttttttctggacaggagtgtacgtgttggttgacggggatttaattgtgcgttcctatcaaggaccagtggcttgtcagaaactccgaaacgggggtgtttgctgggctgcgattaattcgggagaaacggttatcgtggataacgtggaagagtttccgggacatatagcttgtaatgccgcctcgaaaagtgaaattgtaatcccattgcgggacccggaaggccgtatttttggctgtctggacgtggatagcgaccagttaggggcctttgacagggaagatgaagcgggtttgaagaaaattttgtctcttctttatcaatcagatagcgtgaaatgattcgagaaatgtgaaaaataagttaagagacttttgatatttcttaatagagtgttatcttagtgggcataaacaacgaatttattcatgttaaacaaaaacacacggaaaatatgaagaaactacttttatttgttctaacgagcttgtttgtaggaggagctttatttgcacaaaccaatgaatccggcaaagttaagaatgaaggtaatgcagcttggagagccaagaattataaagaggcctttaccaagtgggagcaatacctgaaattaatcgaattcaaagatgacgcaacggtttataacgtggctgtttgtgcaactaaattgaaagattatgccaatgccgagaaatactttggtatgtctatcaagaataattacaaagttgcctcttcttatctgggaatggctgatgctcaagagaacttgaaaaagattcctgaaatgttgaaaacgttacaggacgggattaaagcaaccccggggcaaaatgtgaaattggaaaaagcatattctgattatttcgctaaagaaggtcagaaattccaaaaagcaaatgatattgccaaggctgcagaaaatttcaccaagagtagtcaggtttctaacaagcaattgaaagcccgcggattgttgagtttaggtactctttatttcaataacggggcatctatccttcaaaaagcaactccttatgcaacttctgagaaagaaaaatatgaagcagaaaaggcaaaagctttggctgatttcaagaaagctcaggattatctgaaacaagctgcaacggttgagccgacaaacgaggctgtaaaagaaacacaaaaacaagtggctgatgctatcgctccgctagttgaaaagaaataaagcttaggctgaataataaatcttgaagagatgtgtcaaaatttttgacacatctttttttcgtttactccttacttgtttgaaatttgaaaggctatttaattactattttgcaaaaatatcgtttgtttttcgtaaatttgaataatcaaaggtgtaacttaaaatcgtgggcatggagaaagattctttagataaaaaattaccttgggaaaatcggctatctatatttcggtttgtccagaatcccctaaaatatgtcacggatgaagatgaatttgattgcttaccggatcggattcctttacgacatgatgtaggtatgtattttccggcgtacgacgattacatggattattatcagttcgataaagagattaatcctgaatttatcaaacgacttgcagataagttccaagcctatgtaaatcggggaaatataaatgcgaaaatcgaattttataatctattgaaaggttttcccattattaattatcacagtgattttatagatgaattagccacgagaaaagtcgtgatcactccgcaaataaaagaattagggcgttggatggtcatggaaaccccggacagggaagtggtcaagatgggaattatcttgttgggggtatctcatgacattgaaagtattcctttgttaaagagtattgccaaacatggagagtttacttattatgtaggattagcactatatgaaatgaccccccaatgggatcttatgctgattgatattatagagcctttgtattactggggacggattatggccgtgattctattacttgattattcaccccgggagaatgtgcgaaaatggtgtgttagatatggattccggcacaattatttaccggattataatatcgaagactgcatgaaacaagggaacgttttaaaggatatgcgagaagaaaagtgggatgggccattattacgtgccgtacaagcttacgtggtgtttttacttgaaaatactcgctatgttcacgaaaatggaggagaagtcattcggttatatctaaaatacacgcttgggaaacgaagaggatatgtacagtttcatattatacagtcattatataattttcttaatgtagcgaaaaacgataaaacgtttgtagagaatcttaata

SEQ ID NO: 372 - DNA, 4708 bp, Butyricimonas faecihominis
ttttcatatctcaaaattttaattagaatgcaacatttagagaaaacgaaaaccgccgggcaaaggggtaatcagttccccgttcctgcttcacggaagaaaggtaaaacagatcctccatgttaaaagcgaatttcacggaactcaatccccagcgttccaagaatttcgtgttcgtccggtccatacgataacttaaagcaatagaagtcatctggaaagtattctcatccatgacgaaacgcgaagtcgctttagtcccggctccattaattcccgtattcattcctttaaacttcgccgtatcacccactttcatccaacgcaaatccaacacccgtttatcggcattacgcattaaatccgcattctccaccttatctaccaaagtttgattataaacctgtcctccgaatttatacgccatactcacgtcgactccgaatcccttgtaagcaaaagaggaattgatatttccctgccatttcggctctgtcgtaccacaaggaaccaaatccaccacatcgtattccccggtcatcttgccatttctcttcaacaatatctcttcacctgtcatcggatcaatacctaacgatctaacagcccagatacggttgatagactctccctcttcgtaatgcggaagcggactatcctcctgtttgttgtaattttcctcgttcatatggcgcaacgcctcggaaattttcttcaacttgtccgtgttatgagaaccgttgagagaaattgtccaatacgccgattttgccgtattttgataaggaataaaagcaaaattcaactcgacacctttattttccaaggtacccatattctccggataagaattaaaacccagtgaaggagccaacgttatctgagtcagcgaatttttggtcaatttctggaaatactccgcacgggcagtaatccgtccgtttaaaagccccaattccaaaccgatattccaagtatcagtctgttgccatttcaatttttcattcggcatcgcaacaagttccaccccggttccgtcagaagcgagataaggatgaagcaaagctccataactatacaactcccttgactggtaaggcgcaaacccctgtgtaccggtaaccccgtaagaagctctcaatacaaattccgaaataaaatccaccctcgacatgaagttctcctttttcacatcccaacgaacccccgcagcccagaaaggtgcaaaacgattatctttaccgaattgggaagaaccatccaaacggatactgaaatcagccgagtacttgtaagcataagaatacccgaaacttccggcccaaccaatcaaacgcgacgtgttctcggaaccggtcatcttttcatcatattccttaccgaacaaaatttcatccatattttcattcgggaaacccgttacatgagccccataactttcatctttactctcctgtacagacatacgggcattggcggtaacataatgtacttcacccaacaacttattataactcgccgtcaagtctagagagtactgaaaattctcctgttgggtacgccggaaatctccccgttttgtaggatccgcaattccctcgaaagcagtatgctgggcgggtctgaaaacgtccgttttaccattccccttggaaagagaaaaagaaccgatcaaacgcaaatcactgttaggattgtattccacgctaaacaaatttctcacggaaaaacttgttgttctattctttgtattcaaagtagcattatacatcgggttggcataatccgttgtacggccgcccgcgttggcaaatatcacgaaattatccaaacgttttaaaatttccccgttttccccgtaaggccgtaaataaggattcaacttggtatattcactaaaacttccccaaggagactcgtctcccacggtattgtcaatcgtgatgctattcttcaacaacactttattaaaacggtattgtaaatccaaagatccggtcatcacatcccttttgctccctttcatcacacccggtgtatggttatacccaacatacaaacgataacgcaatgcccggtcaccgccctccaaagtcacggtatgacgttgttgaacggaggtacgcaacggcttatccaaccaataggtatccacgcctcgcttcacctctctcaatttgtcttgataattttgcaagacctcaatactaccgttaccctcgtacataccggccaaaacttccgctctcaatttctcttccgcattcatcaagttgtagtctgacagatctgggatttccacgcgaagatttcccccgtaagttacccacaaacgcccttccttcggaactttagattcaatgactatcaccccgtttgcggcacgagaaccataaatagccgtggcggcagcatccttcaacaaggttattgattccacccgatcgggatccatatcgaccatcgtctgcaaatctatttcaaagccgtccatgatcagcaacggcttattaggataagtgtcatattctccttgcaaagtcaccatttcggccgaagtcccggcattactgccaccgggcaacgtggcttgtcctcgcatacgcaaatcaggcaagcgattgggattcgacccgttcaacacatcctccataatcctaaaagaaggatctatcgcggccaaagccttcgcaatattcgtcgtgctgattttctttaaatcctcccctttcacggaaacagccgatcctgtaaaaccttcttttctccggttaaacataccggttaccacgacttcagacaactcctcttcagcttcttccatcaccacggtcaacggtttcatctctttctccaatttttttatcgcgatctctttatctttcataccaacgaaagaaaaaaccaacacgacactatccatttgaggcacttcaagggagaattttccatctttatccgttgccaccccgatagtcgttcccttcagtaaaaccgtaacaccgggtaaagcctctttctttttatcctgtaccaaaccggttattttaaacgattccttctccgcatcccgtataatctgttccgcccgtgtctgtatcaccacgacatcaccttgaatgtaatatcccaaagccgtgttcttcaaacattcgtcgagtacttgtttcacatcactcgttgtaatgtccaaagtcacttttcccacttgatttacatcatgttcattataaacaaacgtataccccatcttctgtttgacctccttaaaaacagacttcaatgtcacattcgtaacttttattgtggcccgttgtcctaaagttgccgcagaaacggataaaaacgacatcaacaaaaaaacagttgtcaatttcataatcaataaaattttaggtcggacctgtcgaaacagtccctcttcattgttttttttcatacctttgtttcaattttaaattataccaatgtgctgccaggcactttaacatgtcgaacgttgccagacgttcgacatatttattatttcacaaaaacattatttccttcaatttcaatttgtatcgatctcgtttgttctatcaaacgaagaacctcttcaaaactttcatgccgaggcatatccacggagaaacgctcctcccgtacagacgaattttcaaaaaatatattcacatcataccaacgggccaactcgttcaaaatatcttccaaacgttcatcctcaaaaaggaaatatccctgtttccaggcaatataaggagcgacatccacctctcgtaccaccacttcaccatgcttcccttttacagcttgttcgcctggtttcaatacgacttttgtccctttatcccgaatcaaaacacgcccgtccaccaatgtcgttgccgaaggtaaatcagaataagcccggacattaaattccgtcccaagcacttcaacctcgtacaatccctcaacctcaatccggaaaggtgaaagagaatccttggcaacttgaaaataaagctcgccactggcaaacactctacgttcttttccagaaaaagtcaacgggaaacgtaacttcgaatcagcattcaaccaaacgatcgaattatccggcaacaccacttgatactccccgccccttggtgttctgatctcgctatagcccaccttttgcaactggaccgaatcttgtgttaaaaataacacgccattctcattcctcaataccttaccactctctcccaaaaacagattgttgctatccttattcaattctacaatttttccatcgggaagaactaactctgcaaatacccctcccggttcaacacctcgcataacaaccacgggagattttttttcatttttttccataaacacccaagttccaagcaacacgatccctaacaatgacgcaaccataccccaatatttccacgagaactttttcctttcatgcagctttttttccattactttccaacttttttcccaatcatactcatccaaacgttccatcttcaccaatatcctctgcttattcactaacctagaaaaaagttttttattcctatcgtccttcaaccattcatccaattgccttttctcctcctctgccaattttccttgaaggtatttcaatatcagtgtttctatatcaatttgatcaaacatatcattatatttttgcatatagaacgactatatagcctccaag

SEQ ID NO: 373 - DNA, 4706 bp, Butyricimonas faecihominis
atctataacactttaatccatgaaaaacagaagtattatgtgtagattaagaacacgattatatcatatagctcttggggtgggaatgtgtctttccatcggggcatgcgacttgttggaagtcgatccgacaagtgttatcacgagtgactctttttggcaaaccgaatcggatgcacagggaggattagccggtatgtacgtgaaattaagaacagaatccgtagagaaccttttcatttggggcgaattgcgaagcgagacgttggaatccgaggcgattgtcggggataattatatgaagtaccgggagaatgatttgagtgccagtttcggtccaagttggcaaggactttattctgtggtgaatgctgctaatctgattttgactaaagtgccggagatcacgttttctagcgaggatacgcgaaaattgttattggctcaagcccacgcgatgagagcttacgtgtatttcacgatggctaaaatatggggtggtgttccgatacgtaccgaacctatggaaaaatatgatgcagccactgttcataaagcgagagccacgttggaagaagtgtttacgttaattaaagacgatttgaaggatgcgcttgaactatttccttccgatgcattcgagacggggagaaatcattggtctaaagcttccacgttagcattgaaagcagatgtctatttgtggacggcccgtcggatgaatgggggtgaggctgatttccaaacagcgctaaaggcttgtgaagatatacaacagataggtggtattcgtttattgcctgattttaaggaggtatttacttatgataataaaggaaacgacgaagtgttgatggctatcaattacaaaaaggtagaagcaagtaacaactattttgatatgatgcatatttcagctgccaccttgtctccggatatagaaccggatatattggagacgataggtgccggaggaggattgatggaactttctccttctaaacatctacgcgcccagtattccgaagaggatagtcgtcgggatgtaacattcctagagatttataaaacgaaagacggcggtcgcagttactatggaacgatggccatgaaatgtcggggtatcgtggaatctggtgtgcgttattttgttgatgacattattttgtatcgttatgctgatgtattgctaatgaaagcggaggcaaaaaacggtttaaagcaggatcctactgccgaaatggaagaggtgcgtcagcgggcgtatggggaaaattatgctaatcataaatttgtgaacggtacaccggaagaaaatgatgccgctatcttgcaggaacgtctgttggaatttgccacggaatgtaagcgttggtgggatctggtacgctttgacaaggctttcgagctagtgccatcattagtcggacgggataatcaggagttattatattttccgattccgaattcagtgttgagcttggaacctttggttgaaccaaattctgcatggccgatgtaatgttaatattttttcttaatttagccgtcgaatacaataaatcaagagacatgaataatgaggtgttagaaaggctaaaagaagaatatggggaggatgacgacctgattcaactatatgaagattggggggatactccctatttacatgaaatatatcatatactggatgaacatgcatctgattgggtgttggaacgtgaattaggtagttgggcggcagaatttattctggatattttgcaggagcatgaagaggatttagaagagatgccggaaaccgagcgggttgcgttatttaaagaggagattgaggaacgatatgctgatttcaaaagctgtcatcagtttgcccgggtaaacaatctctccttggagtacgaagaagacgaggatacggggtgtgagacattggacgagtacatcgcagagaatggggaagagatcggttttcctaaatattaatcctcgctgatccgagagaaaaatggattgaattttaattatattactcctgtcctgatggcaggagtaaatttttatggtatgttgctagaataaaaaagtggtaaaagtacattgacttttaccactcctcctttattatattctaatccaatcagatttcgatctcgatcaatttagccccggcagtaacggatttcccttcttgggtcaggatacgttttacttttccggcgtaatcacttgtaatgttgttttccatcttcatggcttccaatacaagtacgttttgtcctttacttacaacatcacccggtttaacgaggatcttgaagatgttacccggcatcggagcttcaaccacttttccggtaatcggttcttctttttgaacttcagcggtttgttgtgtttgttcctctttatgcgtggccatataacgggcttctttctgttttgtcaagaagtttttggcgacagcagggaaaagttccatcaagaggacttctttctcgttctcggccaatttcaccccaccgaattctgttaacacgggattttcctgcatttgatattttgacgtatcatacggggtctcttcacgggttccggcaattttcagacggaattccggatcaacaggtaccggggtctttccgtattcaccttttaccaaagccacgaattgattagatacgttagaatacatcggtttaccattcttgatgtccaaggcacagttcacggcttgagcgcctacaatctgactggtaggagttaccaaaggaggaagaccggctgctaaacgaaccgtcgggattaatttcatggcatcttccagaatatccatggagttcaattgttttaattgggctaccatgttggtgtacatacctccgggaacttcagctttcttcacgagttcgttcggtttcgggaagttgaaataagcttcgatagcatgacaagcttccaacaatgcctcttcgttgttactcttggcagcagcgatagcatcatcgaataatttgtcaatgttagccggaagtgtatctgtaagcgggttgaacggattcgggaattgtttaacagcatcgtatgcctccaattctttacgaatcgtgtacaactctttgttgatcttagcaacagcttccatgtttacatccagttcgatacctaatttcttacagaaaatgtaaatcaattcgatagccggagcggcaggaccgcccgcgaaattccagatattggtatcaacgatgtcaacaccgtgtataatagcggaaagtactgcacctaatccgtagcccggggtacagtgagtatggaagtctaccggaatcttcaaattgctcttgaataattgcatcatctcggaaatgcgagccgggttaatcaaaccactcatatccttgatcgtgatcatgtcagctccgagagcctccatttcttttgccttattcaagaaatattcgttcgtgaacacgggttcggggttctttttcccttttaacttgtccatcaaacttaatttcggatatttcgggtcaatcgtgtagcaaacagcgcaatcagccataccaccatattttttcacgtatttgatggtcgatttcacgttgttcacgtcgttcaaggcgtcgaaaatacgcatgattcctaaaccggattcgatagcgtttttacagaaaccttcgataatttcatccgtgtaaggagcgtaaccgaataagttacgacctctggagagggcggtcaacttggatacatcaccgataacggctttgattttttccaaacgatcccatggattttcgttcaaataacgcattacagagtcgggaacagctcctccccatacttccattgcgtagaacttagcatccttgtaaaaaggtaacacgcggtccacttgattttggttcatccgggttgcaaatgaagattgttgaccgtctctaagtgtaagatctcgaattagtaattttcgtgccatgttttataagaattaattgttatgtgttcttttaaattctggatcaaatctattgaaaagaaaagaaatttcctaatgatattcttgaaatatcaaagaaaaactaacaatttttttgaatcctcgaaaatatgattttaatttgtaacttgagatcggatgttttatccgtaactctggtgaaatttaataagtacgtcatggaaagaatcgcaatattcccgggatcctttgatccgttcacgatcggacacgaagaaatcgtgaaacgtggattaaaaatgtttgataaaatcgttattgccgtggggattaatgcggtaaaaaaagaattcttggacgtggatacccggattgccatcattcgtaaagttttcgaagatgtagataatgtcattgtcatgagttattccggtctgacagtagatttttgcgagcaaatgggagctaatttcattattcgtggtttacgtactgctgctgacttcgagtacgaacgtgctgtcggtcaggcaaacaaagcgatggattcttccgtggaaaccgttttccttttaacttctcccgaacatacttttatcagttcaaccatcgtgcgcgatatcttcatgaatggagggaatgccaataaatttttaccaacaaacgtaacaatagaagatttacgtcaataaaagagagaatttgaaacattttagtgtgtttttccatatatataaag

SEQ ID NO: 374 - DNA, 4686 bp, Butyricimonas faecihominis
gtatatttgcattctgaaagaacttgaattctacatacagaaaacagtcggtccggcagatcatcacaccaaaatagaaacactgccttctctaataccatatcattcccgactgttttcttctttctataaattttgatttaggtcaatggggttgttgtgtaaatctgtatttttgaatcgaaattaggatgatatgataaaagctgtattttttgatattgacgggacgttggttagctttaagacccatcgggttccggattctacgaagagagcgattgctattttacgtgccaaaggtattcgggtattaatcgcgagtgggaggcaattgttggctattaataatttagaagacctgcaatttgacggttatgttactttaaacggagggtattgtattgtgggggagcaagtgatttataaacatagtatgccatcggaagatatggtttctttggtgcgatatatggaagagcaagagagttttccctgtatctttgttcatgaaaatgcattttatatcaattacacgaacgaacggacgaacgagatttttcgtttactgaacttcccgcaaccgcctgtcctgcccttacgagaggctgccgaaggagaggttttccagttggtggcatttttcacgaaagaacaggagaaagcgattatggctgccatgcctcattgtgaggcaacccggtggaatccattgttttcggatgttattccgaaaggaagtagtaagcaagtgggggtagataaaatgttggattattttggaatatcgttggaggaatcaatggctttcggagatggagggaatgatgttctcatgttgaaacatgtcgggatcggggtggctatgggaaatgcggaagatgaagtaaagctggcagcggattatgttaccgattccgtggatgagggtggaattgaaaaggctttacggcattttggggtgatttagttgtttaaataactacccccactaactcccccttgcacagggggagaaatcgcttggtaatcggctcttcccctgtgcaagggggagttggagggggtagtatagatttagtcttgttttttatctatgatttcccgaatttcattcgtgatctgcgtgtctgtcaaatgattttcttttaacagttcttccagaacaaagcgatcggcaaattctttcttcagaccgtagttcttgaccttcatctcggaatccccgtaatagcgggcaatcttttccccgaaaccgccatccagcacaccgtcttccagcgtgatcaccagctggtgattagcctttaaatcttccagcatctgtttgtcaagtcccgtgatataacgaggattgatcagtgtggcttggactccggttgcctcttgtaactttcgacacacggactctcccagcgggtagaaatttccaagtgcgatgatggccacccgttctccttgacaggtaattttataacggtttagttcgctgtaatccgtgtcaaaggtctcacctctttcgatgacaaccggccccggaacacgaacggcaacagggtgcgttgtttgtttgatgccccattccagcatggcgaaatattcctctttgcaagtcggggccaagtacacgatattcggtatattgctgataagtggaatatcaaagaatccgagatgagtttcatcattcattccggcagaacctccaagaaataccgaaatgactgccgagttccggttgatacacagatcttgtgacaattggtcatagcaccgctggataaacgtgctgtaaacaccgtacacgggtctcccgccattagctgcgattccggatgcaagagccatggcatgttcctcggcgatccccacatctacaaattgttttccggcttgttgtctgcgttcgggattaaaaccgattaccgcgggtgttcccgaggaaatagccaccacggtagggtctttttgcatttgttccagcaggaattttcctgtcagattgcaataatcttccgtgtttcccccgtcagataacggttgtccggtctctaggttgaacggcataccccagtggtatctttctttgtaggtttccgcaggagtgtatcccttcccttttagcgtgtggatatgcacgaccacgggatgagaaacgtcttttacccgtgtgaaggcgtgtatcaaagcggtaatgtcgttaccgtctttcacgtagatgtaatcaagcccgagagacttgaaaaaattgcaaggcgcttgcccgtcagagtctctcaaggctttcaagttttggtacaaaccaccatgattttcggcaatagacatttcattgtcgttgactaccacgatcaaattggtacctgtttctcccgcattacttaatccttcataggcctctccaccacttagagaaccgtcaccgatcacggcgataatattttcacgatctcccttcaggtctctggctttggctaacccgcaggcaaggctcacggaagttgacgtgtgaccgatcgtgaagaaatcgtgcttgctttcccgtgggttggtataaccggttacctcgtcgtactcttctgcgtgaagaaaggcatccttacgtccggttaacatcttgtgagcgtaactttggtgcgacacgtcatacacgattttgtccactggcgagttgaacacgtagtgtagggctatcgtggcctccaccattcctaggttaggactgatatgtccgccatgagcgcttagtttggttagtaaagcgtggcgaatttcattcgccagtatatttaaattttcgatggaaagacgtttcacgtcttccggggagttaatgttttctagatacatagttttataaatttatactcgttttcctgtttcgtatgcctcctgcatggccgggttccctttgatttctccgacgtgccatacgcctagtccgaagaccacccctttgatggtaggattctccagacaatcaagaaatccttggaacgtgtccacggtgcgcatcattttttctttatcatcttctgccgccgtgacgataaaatagaactctttgtcgttcatttccgtgtagagaccacagcatcggtcaatcaaggttttcatctgggcactcatcgtgtagaaatagacgggtgtcgccatgacaataacatctgcagccaccatcttgtcaatgatctccgcggcatcatccttttgcgggcaaggtttatgatgcaggctacacgtgctgcatcccgtgcagtaattaatctttttatctcgtaagaaaatcttttcaacgtcatttcccgcttctttagctccccgcagaaattcgtcgcacaaggtgtcggagtttccgccttttcgaggactggaagaaaggattaaaattctttttgccataatatgattttttataatgattattctagtatgttgtactcgtaattttatgctacaaaattacatcgcattccctatcccgtttgtatataaattacggggatacgtaccaaaattacagattttgttatttgcggtagagaaggaggggaggaatagaaagattttattcctcagaatttgctaatgcctcctgttctttctttgtcaggcttttagctacaatgtcgtaggattttttgaccagctctttgatttccttgtccggcacgtcttggttaaaataaacgctgatccagtgttttttattcatgtgccatccgggttttatgcccgagtatgtggcttgtaactcttctcttttgtccggggcgcatttaatacagcaaaaatcaaatacttcgatatttacaaagcagaaccatttgcttgccacgtaaaaacataggacgtcttggctgtatttatcgggaacattcgggaagggcatcttctcgtgtaccccttttaaggataagcaatattctctgaattcttcgatattcatatttgacaagattattctacaagtttcaagctataattcaatcccgtctcactcttttcgaatttgtcatttaatagagtaagggtcttttcgtcttcacgcaagaagttgaaaatgtcttttccgttatccgcaaccaattgccatacaatagcatcattattggtagcatctccgcgttgtgtgaatctttttcccttgtaattaaaaatggcatcttttccgttttccgcttcgatataagtcatcgttaacgtgaatgtcccgttgccactatgttcttgattttgtatcgttaaggaataacgaatgccagaacaagaagctgcgggtaaggtcccctcgtaagttcttgtttgtaatgctcccaatgcttgatttttgtacacgatgagctttgttgcggacatccctgctgtgtatttccctttataaaaaatctcggcggtgtcgtttaacagcaacccggtgacgtgactcttatcggcatctagtgtgctgaaagataaggtgtccttgtttgctgttacgatggaaatcgtgttcattgtggcatcacacacgatgccttttgtctggtgttcttttgaggcaggagagcaacagatcattgtcagggctgccagaatgatggatgtatttttcatgtatgttgtttttgattcaatcgagcaaattttataccacatggtgatatatggatcataagaatacttttaaaaataggagtatagaag

SEQ ID NO: 375 - DNA, 4683 bp, Butyricimonas faecihominis
agtatgtttgatgtttataatttattggatatagagccggtcaaggcggagaaagcctatttctgggaccgtgatggaaataaataccttgatttttacgggggacacgccgttatttcaatcggacattcgcatccgcattacgtggagttggtgacggggcaattgaatcgtatcgggttttattcaaatgccgtgaagaatcatttgcaggaggagttggagtggaaattacgggagctttccggttgcacggattataatttgttcctttgtaatagcggggcggaggctaacgagaatgctttgaaactgtcttcttttgttacggggcgttcgaaaatactggccatgcacgctgcctttcacgggcgtacgagcggggccgttgccatcacggataacccgacaatacaggcaccttggagccggggacatcaagtgacatttatcgatttgaatgacgtggaggctttgaaacgggagttgtccggggaggaatatgcggctgtcatcgtggagggaattcaaggtgtcgggggaatccggattccgacaggagagtttctgcgggcggctcgtgaggtttgtgatcagacaggtacgttattgattttggatgaaatccagtcgggctacgggcggagcgggaaattctttgcctatcagcacgcggggattgagccggacgtgatcactgtggcgaaaggaatgggcaacggattcccggttgccggagtgctgatttgcgagtcgatcaaggcggagaaggggatgttgggaacgacattcgggggaaatcatttggcttgtgcggctgggattgccgtgttggatgtgatcaaggacgagcaactggtggaaaatgccgatcgtgtcggtgggtatctgatggagcgattaaaagttttgaacggggtgattgaagttcggggaaagggattgatggttggggtggatattgatattcctcattcaattttccgtcgtcgtttgctggcgaatcaacacgtgatcacggggaatagcgggaagaacactttgcgtttattgcccccgttgtgtgttacccgggaggaagttgatgagtttgtcgctcggtttaaacaagtaatgaattaacagatgaaatgtaaagtcataaaaatcgggggtgctttgatcgaggatgcgggactgctgaaccggttgtgccggaagtttgcatcgatgacttccccttttgttatcgtgcatggtggcgggacttttgccgggcagctcgcggaacgattggggattccccgcaaaatgattgatgggagacgggtgaccgatcgggagactctggaagtcacggtgatggtttatgccgggtggatcaacaaaacgctggttgctcgtttgcaggctttgggagtgaatgcttgtggactttccgggtgcgacctgaatctggtgaaagccgatcggcgggaagggcagagtattgattggggatatgtgggggatgtccgactggtgcgtatgggggggctcgaattattgttacaagccggggtggtgcctgttatttctccgatcacgcatgacgggaaaggggtgttgttgaattcgaatgcggacgggatcgcggcggcggtggcggagacgctggggatgtgctatgacgtggagttgatctattgttttgataaaaagggggtgttgacggatgtcggggatgaaggttccgtgattccttgtcttaccccgtctttgtatgaaaaatataagcaaagcgggatgattcattccggcatgatccccaagttggataacgcttttaaatctgtttctaacggggtgcaggcggttcggttgattcatccggatgatttgggccaaccggatgcgggaactaggataatattggaaaaacaatggacgcgagtggagcaatagaacttttaaaacaaattatatccatcccttctttcagtaagcaagaagacaaggtggctgatttgattgccgatgtgttgaaaagatataggttcgacgtgcatcgcaaaggtaataacgtgtggagtcgttcaaagaatttcgatgacgcgaagcccacgttattactcgatgcacacttggataccgtgcgtcctaacgggatttgggacagtgacccttttacgccggttgtgaaggagggaaagttgttcggtttgggaagtaatgacacggggggaagtcttgtctcaatgctggcggtttttgttgaattggcatccgggagtttgccatgtaatctgatattcttggcatccgcggaagaggagaacacggggagtggcgggattcaaagcgtgtttccggagcttggtcgggttgattttgcccttgtgggagagcctacgggaatgtgtccggcgatagcggagaaggggttgatggtgttggatggttacgcccggggaaaagcgggacacgccgcaagggaggaaggagtgaatgctatttatgaggcaatggaagatatacattggtttcgtacgtatcggttcgaaaagatttcggaattgttgggtccggtgaaaatgagcgtaacggggatcgaggcgggaaccctgcataacatggttcctgcaacttgtcatttcatggtggatgtacgggtaaatgaactttacacaaaccaggaaatatttgatacgatccgtgatcacgtgagatgcgatgtgatccctcgctctttttcactgaactcatcttccgtttcgccttctcacccgatggtgaaacgatgcatcgagttggggttatctccttacggttccccgacgacatcgaatcaggcggtgattccatgcccctcactgaaaataggccccgggaatagcgctcgctcgcacacggcaaatgaatatattcgtttggaagaaatacgggaggggattaaatggtttaaatctattattcaatatgttgaattatagttctaaacaagctaaaagataaaaactagagaatgtgtcaaaagtcatttttcaaactccctccccccttcggggtactccctctataaacagagggagagttgaaatactcccttttttcggtaagagtcaccaactcctcctctgtttatagaggaggtggcacgaagtgacggaggagtttcttgaggataaaataccttttgacacaccctctagttgaaaagataaaagtagaaaatcagaaggcgttggccttgtgtggctggaatttaaaatttaaaatggaatgaagctttgggataaaggatatgatatagatggttttacggaattatttacgatagggaaagaccgggagctggatgttatgctggcgggggccgatgtcatcgggaatttggctcatttgaaaatgttacataccgtgggcttggtgaacgaggcggaatataaatctttgcagcgggcattggttgatattcacgaaatggtggaaaggggcgagttcgtgataggagagggaattgaagacgtgcattctcagatcgagttattgctggtgcgggaatgtggggatgcggggaaaaagattcacacgggacgttcccggaatgatcaagtgttactcgatttgaagttatttacccgggaggcgatattcgaaacgttggaacatatagaacgtttgtttgatttgttgatacgacgggcaggggagaataaagatgtgttgattcccggttacacgcatttgcaggtggccatgccttcttctttcggcttgtggtttggtgcttatgccgaatcgcttgctgacgatttgttggcgttgaaggcggcttacgatatggtgaacacgaatcctcttggttccggggcggggtatggctcgtcgattgctttgaatcggcaaatgacgactgatttgctcggattttcaagtttggcttataacgtggtttatgcccagatgcagaggggaaagatggaaaagaacgtgttattcgggctggctgccgtggcgacgactctgggacgtttggctgccgatgtttgtcttttcgcttgtagtaatttcggttttgtacgtttgccggataagtacacaacggggtccagtatcatgccgcacaagaagaacccggatatattcgagttgatccgggcgaaatgtaatcacttgcaatcgctccccatgcaaatggctatgatctgtacgaacctgacttccgggtattttcgggatatgcaattgaccaaggagttatttttacccgcttttcaagagttgaacgattccctttttatggctcatctcgtgttgcaggagatggatgtgaaacgggatgttttacgagatcctcgttatgcctatattttttccgtggaggatgtgaatgaacgggtaatggccggaatcccgtttcgggaggcttaccgggaaatcggaatgcaaattcaagaggggagttatcgagatggggtacgggaaattcatcatacgcacgagggaagtatgggtaatctttgcttgacggagattaaaagtaaattcgagcaaagagtatctgagtgggacattactacggttcgtgaggcgatagaaggtctgttggggaacaggttatagggattttttccacacttgttccacatttttccacatacttatttattaagattactgtataagtagttgattattttgtaattgtatattctgttttgt

SEQ ID NO: 376 - DNA, 4682 bp, Butyricimonas faecihominis
actgtatatcaatatattaagcaatatatccgtttcttacaaggaaaaggaaccggaagtttttataatgcagaattcttgatttgattccgcaatgggaaaagtgttagtttttctcgggtacgaatgggttaatggatattcatggctatggtgatgaaaaaattttttctgtcagttatttgcttgtcgtgctttctgtcggcccatgccgaacaaagagtcgattcggtgtgcatctattatcggacaggctaccgttatgtggaacctacataccgcgataacggtacgcagttggcacgttttacagaatctatccgtaaggcactccgtgacggaacgatcgagcgtatcgtagtacgttccggagcctctcccgatggaacgaaccgcgcgaacgaactgctctccgtacgtcgtgcggactctttagtttcctatatcgtccgccataccgccgtccccgaagtgttgatcgaaaaacaagccgccggtattttgtgggacgaactgcgggcacaggtggccgcatccggcatgccgtaccgcgacgaagtgctcaacgtactggacaacacgcctgtctggattttcgacgaaaggaaccgggtcgtgggcggccgtaaacaacggctgatggacctgcgcggcggcgagccttaccgctatatgctgcgggagttcttccccgacctgcgcagcagcgtcgtcgtgacgctttatgttcattcagagaaagaaactgccgacagaaaaagtgtattggccgattcccttcggattatgccggagataccggatactacgagaaatgcggcccgcttacagccgggagaaattatcgattctataagtccgcctgccgtcagcgggaatattccgccgtcttctggcggagatgaagagcggaccgacgttccgttccaccgcctggcactcaaaaccaatttgctttacgacgccgtcctgatgccctcgctggaggtcgaatacctgataaacgaacgttggacggtcaatctcgaaggggaagtcgcctggtggtcgaagaaaagcaaacacaaatattaccagatcgccaccatcagtcccgaagcacgttactggttcaagacccacaagccgtggcacgggcattacgtcggactttttgccggaggcagttggtacgatctggagaacgggaaacgggggtacaaaggtgaactgctgataaccggattgagttacggctatatgtttccggtaggccgcaacctctctttcgaggcgggaataggtctgggtttcctgcacacctcttatgaagaatatctgcccatcgacgggcattacgtctaccagcgaaccagccgtaccgactatttcggtccagtaaaactcaagttcgcgctggtatggcggctttggaaccagaatcgggaaggaggtgcgcgatgaacaggaaacaagcgattttgatggcaggaatatgctgcaccgtactcttgtccggctgtcgcaaggatttgtgctacgaccatgacagccacgcgttgagtgtacgggtaaacgtccaatccgactgggaatgcgtttgggaacgggattacggcaagggatggcagaaaaactggccggaggagttcggctgcgagtacgaacgcttttgccccgatccggccaccggcatcgcggcattcgtgtaccacgaggacggctcgcgcacggaacagcacctcccggccgagggcggagagcttccgatgagcgaagggactaaaaacatccttttgtacaacgacgatacgcagtatatcgtgttcggcgacctggactcgtgggccacagcctcggcgactacacgtacccgcacgcgctccacgtacagtttggagcatggggacgagttgaccgtcaacgctcccgacatcctgtacgggacatggctcgattcctacgaggcggttcgcacctcggagcctgtcgatcttccagctaccttgcgcccgttggtatatacctatctgatccgctgtgaattcgacagcgggctggagtatgtggcattggcacggggcgcattgtccggtatggcgggatcggtttacctgcaggacggacgcactggtgatgaaccggttaccgtcctgtacgactgcgacctgacggcgttcggaacggaagcggccgttacctcgttcggtgtgccggggtttccgggggatcattacgtacagcgttccgatcagcgttacggactcaatctggaagtgaggttgcacaacgggaagatcaaaacgttcgaattcgatgttaccgaccagttagcgcaacagccccgtggaggggtgattacggtgagtggactcgaaatttcggagcaagaggcgggcggtggcgcaggtttcgatgcggaggttgaaggctggggagaattcaaagacatagaactgccattggaatgaatgggaatacacttttaaattaacatcaacattatgaaagggaatctgtttttactcgttgcggcggctgtcgtcatggccggatgcagcaaaacggaaacggtcgagatgccggattccgctattatcggtttcgggaacgcctatataggcaatccgacccaatcgagagccgtgagtacgctcacgactgacaatatcaacgccttctatgtctatggaggtcatgacaacagtctaaccaacacgttcgacggaacgaaagtgtccaaatcgggaggtacatggagttattctcccgtacgctactggaatgccggcacgacatatcacttcgcttcgtatgcgcccgaaataccctccggcaagggaacggtcggtgtggatgcaaccaacggacgcctgactttcaccggttacgtttccggtccggacaatcaactcgatttgatctatgcggacgggttgccctttactgcacagcaggagaacaacagccccatatcttttaatttcgagcacctgctgtctatgattaagtttactttcaagagcggttttccggctgatgtgccggtaactatttccggtctgaaggtttacggaatgacggtgcagggaacatacgacaacggatggacaccagccggagaccaaacagtcacagaagatactccgttcaacgaaatggcaacgacaacggctgaaaataaggcggatgcatcgcaggctacgcaggctgccagcgccaatttcgtggtcattccccaatccggcggaacagtgaccgtttcgtttacggctgctgtttctttggaagcaggtaatgtaaagaccaaagagtttaccacgacgctcgtacccgcgtgggaggcgggcaactgctataattacgtggcgacgatcacggagcagaacatggaagtacagtcgattacctacggcgacccgaatgttacggaatgggtggagcaggaaatcgaatcgagcatcggaacgatggtcgtagttaatacggcaggtcatcttgctacattgctggccaatgccaatcccagccagataacaagcctgagaatcaacggcaacttgaatgaggacgatttccaatacatccgtgaagaccttaccgcactggaagttctcgacctctccggaagcgacataaccgaactacccacgcgggcattagctttttacgaaagtatgggacttagcgacaacacgaccctgaaagaagtgaccctgccggaaggattggaaactatcggtaattccgcctttgcaatgtgtactgcattggaaaaagtgaatatcccctctacggttactactttgggacaatggattttggaaggttccggcctgtcgtctttcactattcccgccggagtgaccgaaattcctgcgagctgtttttacggaacggatattacctctatcgtggttccggccggtgtaacctccatcggcgattgggcattcgaagggagcgaccgattgcaatccgttgttatcgaaggagatgttaccgagatacctgaaggttgtttcatttacatttcctcgttaacttccgttaccctgcccacaagcgtccagaaaatcggtgcagatgcgttcaaccaatgtaaaatcgcttcgctcaccctgcctgcctcgctggaagtgatcggggcgagagctttctcgaacaacggtattactcaactgacgatcccggacaaggtaacaacgatagcaaatgccgcttttagcagtaacaatatcgctgtcatagacctgcccgcttccattgtctctatccatgcaaccgcattcaattggaaatcggcaacgaccgttatttgccgagctacatccgttcccgcaacccctcaaacggacgaactcaacaatagttggtctccgttctatcaggtagataaagaaaattgcgtactgaaagtgcctgccgaatcgctgaatgcataccaaacggcttggggagagtatttcaataatatagaggctattgaataaattaccttttattaactcaataacctagataatcgagtaggaggaaaacgaagtagttttcttcctactttcgttttccgatctctcacaccattatgcctacggttctttactttgtgtaccatttgagatattcttgaatatccgactgcttttaacagacctccagtcatagaacaatatgttctagatgaacaatatgtctaattg

SEQ ID NO: 377 - DNA, 4615 bp, Butyricimonas faecihominis
cgcgggtttgagtcccgttttccgctctcattttaaagcacttacgattgtaggtgcttttttcatttcaggccattttcatggtttttaccccctcatgtaagcaatgatgtaagcaaaatcccccgtgtaaaccaagatgtaaaccaaatcattatccggctccccgtgtgcgcgttaaaataaaagaagtaatggtaatcctaccgagaatgaagagagaaggtacctctttttcgaaactgatccagagcttactcgtggctcatgcagcccggatagaataagccccggttaagctctgaataagcaacgaacgagaggtagcttctcgattacttcacggttagattacacttggttctctacataaactggaaagctgaacttcaggtatgattcaatttcaacaaaagttaattctgtttaccataaaccttttaagatgaaatttctaggaagagtaggcgttttttaccgaaactattacaatttttaactgtatcatattaaaaatggtttcagtcattttttacctgcatcaagtaaatccaaatcttcttcaatcataacgtccagttcccgatttgagaactggacgttatcccaccttcgatataattttcctcaactagaaattcaagtaactgcacataacacccctagttttccaaggaatattttttaccttccaagatccaactcttcggtcgttcgcctttcaaatagtagttaaaataatccatcacacgagacgtttgatccaacatattctcgagcaagccaatggtatgtccctctcctttataagccaacaatatacacggttttcccaagcgacgcatcgtgatatataattccaacccttgacgccaatcaacagcccgatcatccgtaccaaatgacattaacaaaggagtctgaatactttgtgcttgaaatatcggggaatttttaacatactcctcccctatttcccaccaaggcaaacgaaaacgagcctgtccagtttcaaacatctcctgattcgaacgcccattttcccagtatatactattgtacatactaaccatattcgtaagaggagcaccagccacggctgcagcaaacatcggagtctgagaaataatataagcggtctgataagccccccaactatgtccaagcaatcctaaacgcatcgaatctatatccccacgtttcaatacctcctgaacagcagcaatgacacaatcagccgcagattctccgggatgatttatctcataacgaatgtccggttggaagacgaaataaccctgcaacacgaaattcatcatattataagtctcccgggcggaaggatgcgtgaaaacattcagacgatgagataacaattcataaagatgaacgatcatcggatactgttgtccttcctgataattcacgggataatacaaagcaccttgcaattcctgacctcgagaattccgataatgaatcaactcactttttctaaaacgtagtgaatcactttgcctttgggttgaaactacagatcgtaccacacggaactccttatctgtataaaacaattctgaagaagtaatattatcttcccgagcaaacaggtaacctcctttagccccagcctttactaaacgagaatagctataaggtccatacaataattgttgatgttgtcctttcggatcataacgaaatacacccgtttgtccgtcacgacctttaacccgcaataaaaactccttatcaatcgtcggatttccccgctgcatggaccgaaaaacaataccttgctcacgtccttgcgtaagtcgttttgtctttaacgtgacgggatcaatactccagatatcatactcatcatagcaccagaattctttatctcccgtaagccatccggctaccccgaaagaaggtgcaatatcaataggaccatcataatatgcatcactcaactcttctggaagctgatccgtcaaattaattaattttccccgtgcaatatgatatgcccaccaatttttatccttgaaataataaacatatttcccttcacgagaaaaagataacgacaatatggtattctctaacaaaagaatacgttgccccgtaacggtatgtaccaagtaccaatcacgatgtgcctcccgataatgaggtcgatagggcttgtcatctacagccaatacataatctccattaggtgcaatggctgccacaccagaaaaggtagtgtcaataacttgtttccaacgtttttcttccggccaccaagcacataggaatgctttcattcgattttcataataacggtctttctgcctggattgtacctcgccatctcgccaatgccaaatgtcgacagccaccttgggaccagcagacttgatttgagccttggaagtcaaaccaaaaaacagtacttttccatccgcagaccaacgtggagtataaaactcgcttaccttcatattctccggcaagttatttttcatatcttctgacaatgaataatggcgcaatttacctccaatattccgaagcactttaatgtccctattacgatgtgcaggaatactatcagcacatactcttaccaatgtcagtccccatgtatcccatttcaaattctcgtatgtagcttgttctatctctgggaatatcgtgcagaaatccgaaagatttataatttctaaatgactttcatcacttcctgcacttcgacacaaataagccaaatattgatgcgtgggatctaacacgtaagaattaatatttgcaattgttttgatgaactttttctctaaatgataaagattcaactccattgctttttcagcacgacctttcaatacaagataatgactatctttcgtaaaggaaaaactttctgcacccttaaatattttttccgttcctgatcctaaatcaagcaaacaggtctgataagctaccccggcagagacatcatgattccccggcattgaaaacgctatccaacgagaattcgctgcaaatacagccattgaagccgaagcatatttatactctttacctgaacggagatgacagatatgcaaagaatcgatccccatggcatactggatacgccacattccccactcaccatcaggagagagatcatactccaaaagtttatgccagatctcaaactcatggtaatttctgtcctctttttctgttgcacacaattctcctccttttcccaacaagcagaggcccatcaggaaaacaataaccagttgtctaatgttcattatttacccagtaatttcttcaatatttcttttaatttaggatcagacggacgagacgcatttacatccacccatcgtccctctggatctatcagcataaaccgtgggacagaacctaatttcaattcatgaggtaattcggtccaatcacccgcccacaactgggttccacctaattgtctcactcgaacaaaatctttccaagctttccggtttttatcaatagaaatgctgataaatacaatatcctgcccctcaagttccttttccagactttgtagagaaggaatttcttttttacagggaacacaccacgtggcccaaatatcgatgtacttgtacttgcccttgaaatcagccatagaatgcaattgcccgtttgtatcgggatacatcagattaggagccaattctcccggctggagaattgaaaccggacgttcttgtaaatgacgcatacgctgccgatagctttccggcaataacggcatataataacgctcatattcgcaataacgacgataatcggttgtcggtatttttgccaatatatactcagccttcaattccggaacattcaattctgccaaacgttcctccatagtatactcccgatcgcggaaaatgaatgtctgcttataagtaaagtaattattcaacaactccatgccataaggttgtttcaatgatcgactatccttttcaggaaaacttttcatgatctgctggtagtaggcactctcttgctcttctgactcataattctgttgtcttttagcgacatacatgacaaaatgattcagcaaatccagctccacgatttccttcaattccgtaacataattcggaagtatccgctccacctcactcaaccagttgttcacattctttctgacagactcaaaacgggggaaaaatgcaccataagtatcactcttctgatccccttttaactctctctccatctcccgccacgtttccaataaacggttttcttcattcccggattgtattacacgaaaattctgatcttcccacacaacctctgtttccacaccagcctgcagataaagccgacaataccccttcccatcatacaaataataataaggttgattttcttccggctccaacatgaaagcaaaacttcccccggaagcaatggaagtaccggcatattctaccggtactccattttctactctcatcaattgtatattcaaaggttgctgctctcccgatacacgtccttttactgtggcaaaaccttcagcctgaaggcttcccacctgcaaaatacaaaagagaaaatataataatctgatcatatt

SEQ ID NO: 378 - DNA, 4594 bp, Butyricimonas faecihominis
aatttgtaccttgttatcttttttattccatatcgtagtttttccttcctgaaactccctttcccgatagtaggtgtattgcccggtaaaggtgagtaaatcattgtctgaaaaatcgtaacttgcgtttaattgtaactcatgcgaatcatctttcgaccaagttatcaattctgattccgttctgtgtatcgtgtcatccctataatttattacctttgtcttatctgttaactccgaataataggtgtatcccggttgataattcacgttatacaccaatttcccaatttttgaagttacccctaaattcggtttaatgaagtctttaccgaaatcaatcataatattcccgacaataccatccggcaaactcccctttgtcacgatattaatcacggcagtcttatcactgtattgtccttgtggcgaggtgattaattcaacttgtttcatcttatctccttgtaacagtcgagctacgtattgatttgcctccgaaagaaaaagattctttttcccgttaatcgtaatcacgaaattcgtccctcccatcacttgtaattatttcgttttcaagtcaatattaacaaacggaagtttctctagtatctgcatcgccacagaatttttggccattgaatcttgctccacatcatatatgatccgatctacttttgttgttaaagattttttgtgctttattacagttacttcatccaaggtaatcccttcttttattctaaacacacctaaatctcctcgatttccctctatcaaaatattttgttgtaaaatctcgaatcctacacaggatatgttcaatttatacatccccttttccacggcttggattaaaaagaaaccatcatcatcacttacagcatgggcaataacctttaaatctgaatttagtaaaataacatgggcttgagaaacaggtttctcctccaaggttttgacataaccttgtaagatttgtccagttcctttacaaacgaccaagaaaaataatatcaaaaataatattccttttttcattagatttcctataactttttattcaaattagatttcttcacgcaagaacttaaattctgaatttattatcgtctctatattagtgttttcgccttctcgattattactacattcatgacttctttacccacttcaccgcatccacaaaaaccaattgttccgggaaagcccccttatcatgtaaaattagttttactttacccttggctagcgggagaacacctacttggatccaaccacattgaggcatttgttgctggtaagaatattcttcctttcgtccgagattgtctgacagataaatgttttgcagtccatttcggagaaacgacatcacaatatccgcacgataatctccttgctccaacgtgtaataataggccactgaatcagcttgcctttggtacctgaaatccaggtctaacttgtatatagacaccccatactctccttgttccggaatttccgttttccattccgcacgggcctggctgtttttcgtctttttacctaaaaaactccgtacgggaaaaccgtaagcatctatataaacggaactaacccatcccggggcattgtcggtcagaaaatcgaccccactatcttccacgatcatcttatcctgcaataatttccctaacaaggattctttcgtctccgaagcgaaaacatgaaatccttgatcctcattgtccacgacaatctctcctgaagacggtaaaaagcaagagggttccaactttttccgtcccgcatgaacaagcgcttcctggggaaattccatgaaattgtaaatataattacccgggatattctgcgccaaattagattgcaagatcacacctcctacactatgggataacgggaaacaaatccgggaacattcaccggcccggatcataaaatcccctacattcaacaaatctcttgaaccatcgcctttatccgtgtacgcggaaataattccgttcacgtctgaagaattccatacactgaaagcaagcatcggcccttcgtttcccttccccgtgtattgttcaatatcttgtacacgaagtgcggcaagtccatgttggtcatacaattcgcatgttgcctcaacaagatcgaaattaaattcacgttcaaattcttccgccagacattcgaaagtaacgcgagaaaaagaattcctagatcggaaattgttcatgaaaacagcaaaactatcctgattcacttttatattaatctgttttctcaaataagcggcttttagcttgtaaatagcatctaaatcacaagactttcccgttcctttcaatacatctcgtaaactttgcgaagaaagagtccgtatcgctttatgttcaccggtttctccgaccttgtataattcccattgtatatcaacttgattatttgctcgcattcctgtcataattcgattaatgcccggaaaattttcagaataaatgtaatcgctaaaatcagtaaacatgggaagaattgaagccggattctttattatttccggtgtaatttgctgcccggcaataaaatccggcaacgccatttttctcaacacgctaatttcttcccctacattcgccgtacaaaaattacgaatcgcctcactttcgatctctgttctagaacttccgataacggctttttctcttttatccgcatactcctttacgggaagataatctgattgatcgcaacaattttccggtttaaagattaattccggttgaatccgttcactccttttcctattttcgccacgataagcacaaaaactaaccggggtttcaatgaaagccaatttatgaaaaggataaacttctccggttagtttttcaaaatatgctttagcctcaccaattccttgcacaagcccttctctagtcgcctcaagcgaagagaacaaggctcctttttcatcaaaataatacaattcaaaacgagtatcgtcaatcgtaatctctcgtttattatacctgcccatgcacaatgttaatcccggcaatgcgtgagcatgatcaaaacgggttccatcccccgtttgtgaagcctccccttgagatataacggtataacttgaatcatggataacggttaacacgtaatccgtaaaatacctgtcggcaaattgtaatgccacgggagatgtctgaaactccacagtcggataccataaacattcgggagttaacaacgtgtatttatcatcaaccaaagctgtatgtttcccgtatctcaaaatattaatactccattgtgtcgcataataatcctgatccggaatatctaaataacaaacactctcgtcaatttctccggcataacgaatcacgaactctttcgcctctcccggctccaaagaatggtgtaatgatatggcaaaatcttttcgatcgaaattcacgctagtctctccagtcgttatgccatcaacatataatccgggattcaggaaaaggaaaaatccatctattttttcccggtagggattacgaatagtcagcgtgtcattcacgatcatccgagttcgatgttggctatactcgatatgttgacggataatttccacacgtttccgtgttgcatactccatgtacaatttcacaaactcctgtcttttctgtcggtctttttcaaaatggaaataataagttcctcctacccagattcctgtaatcagcacaataacccccatccattgtatccatcgtctatttccgggattattcggtaaacgtttcaatctaactacagatagcaacatgaaggcaatacctaacatggcaaatgcgattcgttgagtcacatacgggaaaagtcccacgtgttttcccgtggcatccgagaacacattaggtatcgaaatcgccagatagtccaaactgccatataaataatccgtcaaaacaaaaacattaaaaaagatatatcctatcaagcacaataacgccacgggccatatttttatcgtgacggttatccacaaagttatcccgaccaaaaacaataaagaagggagagttaatgtcatgaaataaaatacatacgggaaaaaaacaggagatgattgcattgaaaattgatggaacccccatgtaatcacaatgaccagcacgttcaacaccacgaaactccccacaacagccagtaatttccccattgcgtaatcgccattcccatgagaacgtgtgcttagcgattcaaaagagtctaaagaacgatctctccggataaaatcacccgctataaagaggataaaaattccctgaataaaattgaaaagaaaagcactcacgaaaggaatcgaacaagatagtgcattcagaaaatgaataggaaagtccacttgtataaaccattgagccgccagactcccatctaccaataaaaacacgagaaaaatgaataaccaatttctccttagtagctttgcctcatagtgactgattaatagtatttgattgatattcataattttcgcgttttaagttattaaaatatttaagccatttctacataaatctttttaggtaatataaaatat

SEQ ID NO: 379 - DNA, 4555 bp, Butyricimonas faecihominis
atatagaatattacaagcaaactattccttaaaagaaaagccggagacaccactggtacggtcccatatttttgcgaagttgttttaacgcctctccctttttatttttaatcgtctgttcggaaagattcaactcttccgaaatctccttggtagaatacccttccaaactcatcgccatgatctctttataatcacccgccaatcgggcaatttcagtccaaataatccgtttcacctcatgttctatgatttccccttcaatatcgagactggatacctgttgcaacagaactttattctttatgtccagatgccgcaactcgttcagacaagcatttctcacgcaagcatacaaaaaactgataatcatctggaacgaggtaaactgtttccttttctcccacgtcttgataaaactctcatgcacgatgtccacgcaaacattctcttcccgcaagaaacgtcctgcgtaaactcccaatgttgcaaaatattgatcatacaacaattccaaggctttctcatcccctttcacaaaacgctcatatacggaagactctaccaacatcaccatcagatttataaaaaaacatcatattccacaccttaaagatattcttttcaaatgtaccgaaaatagtagaaacaacaaaatagaacatgttaatttgttctttccatctcaaaaaagataataattcatcacacaaaagaaaaagctgctcgaaaagtcctatctgttacaaaattaactcatccggccttcgcccacctcctctataaacagaggaggagctggtgaattgccctaaagatagcaagtaactcagctctccctctgtttatagagggagtaccccgaagggggggagggagttagaaaaacaacttttcgaacggccttactttatggaccttataaattttgggcctacatcatttcgtcttgtaaaatactctcaacggccgatcggcaattcccccgtaagactcgatcaatttaccgtcattcgcatcataaatgtcaattccacccttcaaaccacttctctcgctatccacgtagcaaacataaatcagcgttttatccggatccatagccacagccgtaatctcctttgtatcggggaatgtgataaacggggtcttcgggaattgcccggtacaattccaacgataaatattattcccgtaatcatagtaagcattcttgtaagttttactaaacatgatcgttgaattcttatccaacttcaaatccgttccatcaaacttaatcaactccgttaacttggataaagaaccacttgtctgaaatactcgaccttgtgacggatcttccttcaaaacagctatcgtgtaaagtttcgtgatcgtccaaggcaccattccgatgatattataatcctcgaaatagttggaagaagaggttgctttatttcccgtcggagaatagataatagatttatcgtaatcaatgaaatattgataggaagaactatatccaaagaaacaagcatcataaccatacccaacagcattatcaatcaccaacacttcatcaaaggtaagctcgtaacgatatgcacttccattttctgataacatccaattcgttgccccacttcccatcaactccttacaagtgaaatccggaataatatcccttaccctgttcttatacataactccgaaagtcttggcattcaatttatagatcaatccatcctcccgagaggccaacagcagatagggaccgaactgtgccagatccgtgcaatttttaatcgtgtagtccgggttctcctttgtcagaacatccgtaacaaattccttcttcaccccggattctatttcctgccgggtcaaagttttcataaacgaaatccgaggattccccgcatcatcctgactcaataccgtgattccttcatcataaggtgtcgtcacgttcaacataaaacctttaaacgagatcgcctccccattatccaccttcaatcgcaaataataagtacctaatttcctgaaagtataacgtaactcggcctcgttagatataatttttaaagaatcctttgccggataatcactctcatccttggtattataggtcgcatacccccactcgtaagtcaacggtctatcctccccgctttgcacaacatccactttgtaaacaaactcctcgcttagattcacgctcaacgtgtcgtattgagaaatgattgaaagccgggagaagtccgggtccgccaagctcgtatcgtcatgaatacaagcatccagtaaaccacttaccagaatggcgaaaactatgtaatatatctttttcatcgctcttcaatttttatttagatcactatacaggagattacatcaaatgaatttatcaggattcggcatattcaccccttcggtgggatgttcttggtaatactcgtacaccggtttcaacacgtatttcacccagatacccggataatttctagaccagaaccatgccggggcattctcaagcaaccgcccgtaattctcttcgaaataagcatattccaccggacgaagttcctccagttcccagtatttttccaacatccgcttaaacaaatcggaagagaacgttcccagatcagcatctttccaccaatccggccgggagtactccccgtcagctatcgacaaaatataattatcatcggcaatcggtttaaaatactcatcctctgcaaatctcaaatagaggtaatacgaacgttccttcatgtcacccgtcttgtttaaccggatgttcaggacacctcgaacgctatcggcgggaatcaccacctctcccatcacgtaatgcatgttctcccgtgctgttgaagaatcggcaacgaccataaccaccgggtgctgcacctcgttcacgggtttaccgatcacccggatcgggatacagtaatcgtagtcatccccttcaaccgaaacaaaagagaaaaaaatagtatctgttttactttcccggtcaaaatagacagaccttttctgatgcacgttatacatcaggtcatcatccgaacaggaaagcgcgctcaacgctaatccaatagcaaaactaattaatgttatccttttcatgtctttcgtttttaatgttaacgggcattcatttcctcttcgggaacaggcaaacaatagatcttgtcacttcccggcagggttaccgcccctatgattgaatatacatcccggttctgccgtttcatgcaaaaccactcttggccttccccgtaatattccttacggcgttccttcataatatcatcaagcgtcaattgtcgagccggaatccggtctttaaacccgaccattccccgggcctccacaacaacatccatataatccgtggccaagtcgatattctcttccagcaaagcttccgccatgatatagtacatctccgggatacgaatcatgttcactcccagaataacgggttcatcgtatttattcgggtcagccaaaaactcgtagttaatcagcttgaggcaagtcgtggcatctttatccgggtccacgtcaaaccagaatctcctgtaatccacgccctcttccgctccctgattatctaggtacaagtcctcccaatccgaggccaaatctattcccgtacttctaataaataaattcttcatcgaggtcccgaaatcccttgtataaattccccagatcgtctctttaaaagacaacttactctgtaccatgctctccacctccgttttatccaccaactggaatttatgagaatcaatcaccttttgagcgtagatcttggcattcttcaaatcgcccttcatccaatacacgcgggccaaagctgcctccgctgcgtacaaattgaaatgagtctcccgggctgaaacgaaatcagcagcgtgtcccgttctttctgcctccatcaaactctcgtcgtctgccaaaagaccaattgcccgttccagatcttgaataatcttatcgtaaacctccgttaccgaagaaaagggtgtcacgtaaaactcgtaagtcgtgacgtaaggaatggcgtgtgccttggccgtttcatctttcgaggtaacatgaacggcataatatcgtagcaggtcaaaatgcagataagcccgaagccctaaagcctccccaaggtaaatattataatgtttgaacgccttctcgtccttattctctaagtttataataatattgttcacgtaaccgatcgccgtataagcttgtttccacatcttcatcacatccgattccatcataagatcgcccatgttcaatttcccgatctccgttcccttgataccgtcatccacgaaattctgtgcgaacagttccgggtaatacaccgacatataattaccatacaaataactattggacaaggccgaatacacaccatacagggcatcctccacgcccgaagccgtgctgaacatatcctcgtcaatcacctccgccttgggatttacatccagaaagctatcgcaactccacccacacgaggcgatcagtagcatat

SEQ ID NO: 380 - DNA, 4554 bp, Butyricimonas faecihominis
accgctgacttggcgtcccgcctacgcgccctttaaacccaataaatccggataacgctcgcatcccccgtattaccgcggctgctggcacggagttagccgatgcttattcgtcaagtactggcaagatcgcacacgtgcaatttattcttccttgacaaaagaggtttacaggccatggaccattcatccctcacgcgacttggctggttcaggctctcgcccattgaccaatattcctcactgctgcctcccgtaggagtctggaccgtgtctcagttccagtgtgggggaccttcctctcagaacccctagacatcgtcggcttggtgggccgttaccccgccaactacctaatgtcgcgcgtgcccgtcccgtaccaccggaattttaaatccagagccatgcggctctagagtcttatgggatgttagtccacgtttccgcgggttatctcccggtacggggttggttgcacacgtgttactcacccgtgcgccggtcgccaccagtgtattgctacaccgtgctgcccctcgacttgcatgtgttaagcctgtcgctagcgttcatcctgagccaggatcaaactcttcatggtaaaagttatttacagaaattttgttctggccgggtcatgtgtttcatgaatctcgactaccgtcgatctcgattcacgctcgctacgttttgttcatttcaatatcttaaagaactcttcttttcatcttgtcgcttccgtcatcccctcgtgccctcctcttgaaagcggctgcaaaggtaaggcttgtttttcattctccaaatttttttcaagctttttttcaaactttttttctcgcccctcgtttaacctctttccctcgtgccctctctctcgaaagcgggtgcaaagataaggcaatgattcccccttttccaaattttttcaccattatttttcatctttttttcaagcccccgaccaataccgtgactggcaaaacgttaggaagaaaaaattttaccgggaaaacgggaaagaccaccgggaaaagggaggggaaggcggcaagaccgggaaaagggaccacgctctcgcccggcaagcacctttcatggacacccgtgaacgtctttgaaacgtctttgattcgaatttgatacgcctttaatccctgtcttccccctgttttcaacgggaaaacaacgggaataacaacgtggccctgacgattcttacccgccgaacgaacgcccacgagcgaccttgtaccgaaggtgaaccgaagatgtaccgtgattgattgctgtcttcatcctgtaatctacgggtattcacgtaaagtgatcgaaaatattaaaaataagagggagtcaatatttttttcaactccccctttcgcacgcacctgaaaataaaaagcactttatttcttctttttcttcttcgtcaattctgccattttagcacgaagttctggaaacgagagatcacgggcaacgatacgattctcggcatccagcaggaaataagccgggagatctcgtaccagatagagacggacaatctcagaatccattcctttaaggtcggaaccattagtccaaatcatcccgtcaagtccgatagcctgtttccacatggcagcactttcatccagtgccacactgacaatttcaagacctttcgggcgatattgcaggtaaaacttaaccaaatcagaattatcctgccgggaactaccttgttgtgcagcccaaaaatgtataaccttccatttagcgggcaaaccgtgtacggtaaacgtattaccatcaggtttcatcaaggtaaaattaggtgcaacttcaccctcgaccaatttaccataccgatccagcatagccgcaatagctttgccgggagctgtggcacgagccgacgttcccaataattcatatttagcacgaagtgtagtctcgtcgtcagctgacatattcaaggcgataacgtaagccgagacataattgtcagcattagccttgatcaattcctgtgttttaagcaccgattgcttgtaagcattatcaagacggagttgcagactttccactttcgctggattgcccccgccttccaaggccttgtactcggcctctactttattcttctccacagcataatcatggccgatacgttcaaactctttcaatagttgtaccgcaggtccttctccctcgatagccgccccttgagccgtgacagaaatctggtaattcacgtcgttctctaacaacaacgggacccgaccgtccacccctggaaaaaccaagatcacggcacgagcatcccccggcaatacacctctgaacataaagctaccattcacaacctcagccgatgccagcgtgtccgccgtcccgaaatcagccgccactgcgtgtactctcgcaaccgccagtccccgtactttcccggataccatatagccgccctgtgctagacaagtaccaccaaacagtatcccggataacaataataacatcatcttattcatcataatcaatttatatattacacaatctcttattcctaaattatccgaacattccgatttcaaggagctaccacggatagcttcatcttcaaattcaactgaagcaggggtagggcaatgacgccgcgctgtatggatttcagactcttgtcattctcatagtaatcgcttaaatcgaacttatacagtttggggcgtatccgctcccgaccgatggcgacataaagttcgcgcagttcatcgtcgctcagcacatcgaaaatctcccgcgatagggcaagcgtgtaatcctccaagctaccgccatcccgttctgcttccgcgtaagcatacacggaaagaggacgttcttcctgctcagccaacttttgcaagcgaacaagcacatctgcggggaacgcccgcccgacaatttccgtcatccaccgctccaattttttccagtttttcacgggaagcgaaggcaaatgcgtcttgactacagcatttgtttctttgctcctcacaaatatccgaccatgtttctgttttaactccaatccctccacttcacgctccagcacttctggctcctcgtcaccacgcccatcgtcctccagaatcaagccgtacggtttttcttccgtcgtatcgcgctgatataggcccaacagaaagagcgaagcataaagtccatcgcagtcattccattcatgaaaccaatcacgacggcagggaaaattgtactcatccttcgcaagctttttccattctcgaccgacggcaacataaaactcacggacttcatcatcgctcaacgcattgaacagagcctcaccaatagtaatactgtaacttttgatacgcccattccgttcggcttccgcattcacaaaaatcgttgctaaaggattgccttcctgcccctctatcttcctcaagcgatcgagcaccccggtaggaaacactttcacgacgagttctgcccttctccgttccactttttccttatcagtctcccacaaagcgtatagcttggaagaacgcacgggctccatcttttcacctttgataagaaccaccccaaaacccatcgcttccctcctctctatctccaatccatcaatctcacggtctgtatttccacgtcccttccgagcatctttcgtttgccccgtagtcattcccactaccgcaagcaatatcaatattgccacccatttcatatcatttctttttaaatacttcgttttcaatcttgtccaatcgatcaaaatcaccaatacgagcactcagcgttttcctacagcaacgacaccttgccatcgataccttcaaaaatcaatgtcacggcacaggcatcaaccgccaccacacgaacctataacaacacttccttgtattttttctttttcatccatcttgcattccactcctcggtgacatctcgaacttcgatatcctcttttttccaagtttccattgctctttttctgcgttctttcatttctttaacatatttaacatcctcaatattaaaaacatcaaagaaaactcgaaaatcatctttaatataagtttcctgcaatttatacggcaattccaattttttcatgataagttgttccagctcgtacaacctatccggtgaaagatttccccaaaatgaatttgtggcacttagatagaaaaaattcgtcacttgcaacaattccttttttgaggcatccaatcgcaaagttattcctgctaccacaggtaggcactctttcaattcgtccgcagaaagaaaatcatgtagaattacagccaattgagcctcaagatctaccatttgagcgggtattacatctctttcgggaacctctttacacgtggtgtccgggttattcacgttttgtatgtacgtaaatagtttctcgaatctttcttttccccgtgatactcgatacgtcacattcttacctttcacgatgccttcctcgtacaatatttgtgaaaacaaggtattcacgacaaacaaggctataaataatagtgtaatttttttcatggt

SEQ ID NO: 381 - DNA, 4545 bp, Butyricimonas faecihominis
aaacggttaaattttaattaaaagaaatttccattaaaataattattggagaaaattaaaaacaaactaatttgtcatttgtatttaatacagaacagacggcgaaattaggagaggtttccgtacgagcaattgacgaaacggtggagaatgttttgcgtaaagtgttgatgaatacgggaatgctatttgaatttgacggaacattaatcattgttcgtccagatgaaccgcaaaaaaaagaggtgacgaagattaatgtaaccggtacggtaaaagatgagaatggggaatttttaccaggtgtaacgattttattgaaggggtctcagctcggtacggttaccgatgttgatggtaaatttaattttgaattaccgaagcaggatagtcttgtacttgttttctcgtttataggatacaaacagcaagagataaaagtgaatagtgagaatttacaaccattatcgattgtgttaaaagaggaggtaacagaagtgggtgaagttgttgttaccggttacttcgaacgtagaaaagacagttataccggggcggcaacaaccttttccggagaagaattgaaacaaatatctacgggtaatgttttgacaacgctttctacgcttgatccctcttttaagcttgttgaaaatttagatatgggaagtaatccgaattatgttccggaatttacaattcatggtggcggaaatctgcaaagtgattatgaaaattctcctaatatgccaacctttattatggatggattcgaggtttcttcggaaaaagttttcgatatggatcccaaccggattgctagtattacaatcctaaaggatgcagctgctacggctatttacggttcgcgagctgctaacggtgtagtcgtaattgaaactaaagctcctcaaatgggaaaacttagggtatcttataatttttcaggagattttgaaatagcggatttgagcgattataatttgatgaatgcagaggaaaaattggaatatgagcgacttgctggtttgtattctcattctaatgtgcaattaggggacgaactgatggacagatacaatgagattttagctttgattcaatcaggtatcgacaccgattggattgccaaacctgtaaaaaatgtaggtttcagtcataagcattctttattggtggagggtggagatgacaaattacgttacggtttgactctgacttatcaaaacaaagatggggtgatgaaaggttccggacgcgacaatttgggtatcgatgtacaacttcaatatcgatataagaccttaaaatttatgaatgacctctcctttaatcgggtaacaacgagcaattctccttatggtgatttttcagaatatacttatatgaatccgtattactatccgtatgcggataacggaaatcctcagaaagtgttgtatacctatgaaaatggagaagaagtttggaatcccttgtataatgctagtttagggactaaagatgaacaagcttatgatgattttcttaataatttctctttggaatggaatgttttgagtggtttgaagttgaaaggtaatatttctttaaatcgtaaaacggttacgtcagataagtttttgccgggagagcatacatcatttcagaatagttctttgaacggtagttatactaaaaccatagaggaatattttacttatgatgccaatgtaactttgtcttatacccgttctttcgggaaacatcagttgaatggagtcggggtttggaatgttaaggaaacccggtcagatatgtttgaaacggttgcttacaatttccctaatagtaatatggaccacattggtatgggaattgagtatggtaaaggggaccaaccggatggcaattacgaagtgagtcgtttaatggggtttgttgccaattttaattacggatatgataatcgctatctagtggatgcctctattcgaagcgatggttcgtctttgttcggttcagataaacgctggggaactttcggttctattggtcttgcatggaatctacacaatgaaagttggatgaaaaatctgggttggtttgatcagttaaaattacgcgggtcatggggaactactggtggacaaaatttctatccatatcaagccatgatgatgttttcttacaaagatgaattactgagttctcgggaggattcggaagatgaaaataatagccaaacttatgatggttatatcggtgctttgttaaaagcgtttggtaatacaaaccttaaatggcaaaaaacggaaaaaagaagtattggattggattttacattgcgaaatagtagaattagtggttatttaaatttctataaggatatatccaaatccgtacttacggacgttttagttgctccttctcttggttttacatcttataaggataaccttggagaagtagaaaacaagggaatcgaactgaacgtacgggcaactcttattcagcgtccggctaatggtttgcgttgggatgtattcttgaatgtcgtaaaaaataaaaatcgattgatgaaattaaatgatgcacttgcggcttggaataagacccaagatgatgaaattacagatgaagataataaagaggctagtcgaccggtagtacgttatcaagaaggagaatccattaataccatttgggcaaatgaatctttgggaattgatcctgttaccggtgatgaagtgtttctagatttaaatggccgacgtgtagattcttggagcgcttccaattataaaccaatgggttgtgaagatccgaaatttgaaggtaattttggaaccatgttgaattataaaggattccagttaagtgcttatttcaaatatagttatggaggagatatatacaatcaaacattggtggataaagttgaaaatgttgatcctttgaaaaatgcagaccggagagtcctttatgatcgttggcagaaagttggagatgttgccaaatttaaagcgatagataatactacaacgacctatccgacatctcgttttatcgaagaacagaattatattacgttatcttcgttaaacctttcatacgaatttaatccggaagtattgaaatttttacacgttgaaagactgaaattatcactaatcggtaatgatatatttagggtttctacggtgaaaatggaacggggtattacttatccctatgctagaacattctccctgtctgctcaattaactttctaaatcaatatgtatgaaaagaaaaatattacttataggattactggttataacttttggatttgtttcctgtagtgattggtttgatgtttctccgaaatcggatgtaaaagcagatgacctttattcgactgaaagcgggttccgggatgtgctaaccggtgtatatgctttgatggcaacagaaaatttgtatggacgtcaaatgactttcggttatgtagatgtattggctcaatattatgacaggatcagtttgaagagtcatgagtatatagaaacggttaatttccaatacaaagaacctgttgatgaaattgctatcaataatatatggagtacccagtacaaagcgattgtgaacttgaatactttgttattttatatagaccaaaatcgttacgtgtttgaatcggaaaatatctataagatctataaaggagaggccttggccttgagagcgtttttgcatttcgatatgttacgtcttttcggtccttcccctataatgggtgaagatttgaaagcgattccatatatggattcctatacaaatattgcgaaagagaggtcatctgtcaaggaagtattagaaaaagtcgttgcagacttgaatgcggcacgagagttgatgaaagaagttgattcctatggtcctgaatatgaaaatttaaaagacagttatgcagacgatagacgtttgaaaaacaggtattttcatttgaattattacgctacaacagctttgttggctcgggttgagttatatgcgggacatacccaagaggctctaaatgccgctgtagaaattattggagaaccggaaaatgaacctgttcaaccttttgaattggcaatcgagtcttcttctgaggatcgtttgtttgaatcagaaattttatttactttagatatagccaatttggagaacattattgatccttattttggggagactgcattgaaatctgggttgaccaatagcggaacgatacttgctttcagtacaaccaaaagagataatctgtttggaaaagagtctccagcagatgatgattatcgtttgaaaaattggtttgccactacttctagttcgaattccctcatgtctggaaaattgacggatagtgaacaaatgccgcttatccgtttgtctgaactctattatattgcagcagagtgtgctgggggtagtcggggattggactatttaaacaaaattcgggctcatcggggtttggtagcttatacagacgcaagtaaactggaggaaaatatttataaagaatattgt

SEQ ID NO: 382 - DNA, 4541 bp, Butyricimonas faecihominis
ttataataattgacgactaaattaattcgattgttaaataacgaagcatcaaaaccaatattccgattttcctgacgctgccacttgatcgaaggattcgaaggatcataacgatccatgattttctcgccatcatatgttaaattaccaactttcctcaaaacagagaaaggaagggcattacggtcaatacttccaacaaaaccataagaagctctaattgccaattggcttataaaaccgaatcgagtcatgaaaggttcattatgcaggttccactttccactcacattccaaagaggagaaaaacgattctttgttccaataatatcaacaccatccaaacgagcacttccctgtaccacgtaacgatccttataactataagatcctgtcacaaacaaggaaacacttctatcttgtgattctgaatgccctcctagactggacaatgaacttttaaacgctgattttatcgtcattccagttaaatcaggataacttgccacaccataaatatcgctccattcaggaatcatacttgaaaaaccatatccttttgttgaagaaacttcctgccccaaataagcattaatataatgatctccgtctgagaatccacgggcaaattccaactggttacgaatcgtccattgttgagagcgagacgttgattctttcatcattccattattcatcgcatccggaacttcttcctccgaataaattcctcctaaccatgaattatatttagaagcaaatgaccccggtaccaattcttgcatagaatgattatttgaattcgcaaacgtacccatggaagaaagcatcaaaccttctatgattttgaattccaacttcaaacttacctggttactcaaataccttgatttcgtcgtgttattatttaaatcctctaaaatattaaaatcatacatgtaaccatctttgatcgaacttttggttgaataagaactacggtcataagcataatttccattttcatcatacaaacgttcatatggatttgcataagtagcataatccagcggatttaccggagaagcagaactacgatcattccttaatgtactacgcacatcaaaatgaactcgcaagaatttattaaaatcatgggttaattttatcgaagctcccatactttcatatttattattcggcataactccttcttgagaaaggtaagaaagactaccataatattgtgttctttcatctcctccggaaagagagatactataattttgagtctgagccactctgaaaatttcatcaaaccaattcgtattaatcttgcttaaacgatctatctcggcatcagcttctactttagatatttttccattatcaacatctttcaataattggaatacccgtcccccgatattcagccctgggaaatcctcataaataccacgttcaaaagcaattttttccttcgtattcatcattgttaaacgattactaggagcttcactcaaaccataggatgcttgaatatttatatacgaacgcccgacagatcctctctttgtggtaacaacaataactccattagcagcccgtgatccatagatcgctgttgcagcggcatcttttagcacagtaatactttcaatatcatcaggaggaatattaccaataccactcgtcaatacagtctcttgaaattcagtaccacccatacttatttccggaacatcaccagaaagaggcattccatcaataatccaaataggatcggtatctccggtcaacgaatttataccccgaatccggatcgttgcctgagcccccggcctaccagacaaattcataacggcaactcccgccatctgccctttcaacacatcttctatactcgtatatcccttattggctatatctttagaagtcacgacctcaacggaacccgtcattcttgttttcttaatttcttggtaaccagttaccacaacttcatccatctcggtaacatcatcttcaagtattacaacgattggtttctcttgctttttatactctattgtttttgttttcattccaataaaagtaaacatcagcacgatcttctcctgttccgggatgactaacgtaaactcacctttcacatcagtagcaacacctattacagtccctttcagtaaaacggaaacacccggcaacaattctccctttttatccttcaccacgcctttaatcgtaacttttttcacctcatccggcgcgttcacctttctttctgaaataagaacatagttatctttgacctgatactcgtactttttgcccaacacctgtgccagaatctcatccaatgtcccgctagtggaagtcagcatcacgttctgtttcacatccaaaattgccgtgttgtaaaaaaactcatagttactctgtttcttaatttgcttgaagatcgactcgatagtcccactcttcacgctgaacatctcctgcgccccttgggaataaacatctttcgcccaaacgctggaggctgaaatcaataatagaaaaaatagatttcgcatgtaccttaaaaattttaccgatccattttttttcatacatttgtaattaaagttaatgactcactcacgaacatcgtctggtaaactttttcgtgaatgttgttatccatagatacagggaaggtgagatttccctgtattttattttcgggtaattaatatatgctttccatctacttgaaatttcacttccgtaatcatctcgataagttctagtagataactggcaggacgatccttctctgcagccccggtaaaacgtaaatcccgcaaagcgtcatcagaataagacaccgtacaatcataccaacgattcaacgtgaccataatgtcttccaaacgcatatcctcgaaccggaactttcccttcatccaggagatataaagttccgggtctacctcagccatcttcacttgatgattctctcgattatactcgaatcgcatccccggggtaatatcgaaatcctgttgtaactggtgattacgcacggcgactttcccgctaaccaacgtcaccgaaacatcttgatccgtcgtgtaaccggaaagattaaaagaagttcccaatacacgcacgtcaatatctgccattttcacgatgaaaggtttatccgatttcgtcacgtcaaaataagcctcgcccgttaacttcacctctcgcacgtccccggtaaaaggcaccgggtaagtcaaagcagaacaggaattcaagcgcacacttgacccgtcagataagagtacttgaaattcaccccctgccggaactgtaatcgtgttatataaaggttccgatttagtggtagccaacgtgtagtccagtactcgggaagaatcattttttattaccacgccttcttgttcctgaataatggccgtactatttaaaggcacttcccggccatcactcaattgcaaaactgcaacaccttgtgctggtagaatttcctgtcgggtcagctcctgccgttccgattcacccgatcctcggaaataaatcacactacttcccaccatcgctaaaataataatagccacggcataacgatagaacacaaccactcgccgattccaagacacatgtatcttgcgtttgattgaaaaccataattgttctagtttaccttcaggaacttccggtaaattctcgacgtcatcatcaaattgctcgtaccatcgggcaattcgctcttcctcgtccggagtacatcgatgttcccggtacttttttaaaagatcgtatatttcatttatccccatattcgccgtatttaccttaaagacaattccggggaacaaaaggtactatatgaaaaataaaaaatttttacgacccacctcgcatcggagcctacgtgtaatatcacctaattgattcttaacggtttgttcagacacggccaacttttcggcaatttcttttatcgataaattttgctcctgccggagcatatacacgcattgcaaacgaggtggaaacccatccacgattcgccggatattttcatccaaatccttagccacgatcttcacccatgtgtaattatcctcttcattcggggcgcatatatcctgatatttatcacgaatctgttcttgcttgattgaattcaatatatgatttctcaaccaaatcaagagataccctttcacggaagacgaaacctgaaaagaatctcttttttcccacacttggataaaaaagtcttggaaaatatcatccgcatcaaaggaactgttcacacgtgcaaggatattccgatacacaatatcagcataccgggaatacaactcttgaaaggcagagacactcccgttctttatatcacgtacaatttcaatgtccgatttttccgacacgatccaagctttaaagataaatattcgaacgtttaatgatatttcggcaagacaagtctctttttaagacctcaaaggtgaaatccttgattgttagtagaaaaaaatatctatattctttgaata

SEQ ID NO: 383 - DNA, 4536 bp, Butyricimonas faecihominis
atcgtgttgtatatttgctatatgggctgttatgaccggatgacaggtgacgatagggctggggcggggaaaggggtggtgattagtatatatccttcctcgtaatcatttcctatgtattcgatccggatggacggatccttttttaatggtttcctgatccggcacacgtattccttcaccctttttcttttaccgaaggagcctccttcccatgttcccttcatgaggtagtccatgtgggaaatttgattgcttttggcgcataataattgtaaaagacgtgcttcaccggagcctagcaggatggtttctccttggatggttaacgtgcgtgcgacagcgttgaacgttgtgatgggggagagttcgtacacgtgtgggaggtttaagtgggcgatcattttctggcgcaagattttcaaatgggcgattaaaacatccggagtgcggtctttgggaatgaattcatcagccccggcatctagtgcggcgatttctctttccggttccccgtgggaggtgtagatgatgatgtgagtgtgcgggtctttctgccggatcaaccgggtgacttcgatcccgtctttccgaggaatgttgagatcgagtagtagaatatcgggcttttgacgattgtaggcatcccatgcttttttcccgtctgcggcgatgtccacggtgaattcgtgttcttccaggagaattttggtcagttcagcatcgagttcatagtcttcggcgtaaagaattctcatcttgtttcccatgatgttgttttattttacaggtaatgttacgataaaggttgatcccgttcccggtttgctttccgcggtaatcgttcccccgtgtgcccggacaatcatgcgtgcgaagtacagaccttgcccgtggccattgattttcgtgtcgccttgatgatctcctctggagtatcgttcgaagatgtgtttcaaggcttcgggcgagattcccgtgccgttgtctctcaccttgatgcggatcgtgttccggtcggtttcctcacacgtgatcagtatatgtactttttccccggtatatttgaatgcattgtcaatcaggtttatgaaaaccggttgtagaaaattaggatcgcctgcgatcacgtgccgattggaaaggtattcgagtcgaatgtctgcctgtttttctttcccgatgttccatgaatccgggttactcagttcatccagcattttatacaggtcgaaatctttgatcttcaatcgtaagccgtgagcattcgtggattggagcaacatgcgattgatggatcgtaacatatcattcaacccggtagtgctcttttccagtaagattttttgttcgggggaaagagttttgtaaagtacgcgatgaagtttgagttcggtttcgatagggcgtttcaagtcatgcacgatgttgtgcacgaaaacctcccggtattttccggttcttttttcccagcggagcgtgtggaaaagtgaaatgacacaaaaaataagtaatagggcgacgaaaagagttaacaggatttggttgccagccaaatttaggaatagtttgaaagggtaattataggaggcgtataacgtgtctttagtaagaaaacctaatggcatctttaattcgcacgagcgaggtgggatccaactggatggataggaggctttcatttggttgatgctatccttgatggcaaaattgatgggcaggttctcgatggcgctggaatctcgttttgcttgcaggtagctgtaaaaatgttgtaaggtccaacgagaagggtcttgtatgtcgtaatcactttgttcgatgatttgatgtattttgtcttccgtttttaattgaaaacgggaaatctggtcgttaataatataggttaatcgattattttttggattgaaactgacagtttgttttggatctgccattttcatgttaaattcataaattgcgttagtaatccattcattttgttgggccatgtatattgtcttttcatgccggtgcaattgcatgatgtaaaataattggctaaacaggatgattagcccggcaagaatggcaataaaccagtaatattttgaactccgacccattttcagtgtttttttcctcgtatcaaagatattgattttgcaacccttgtgcaaccgttttattcgaaaaataagctctaaaggcttatttttacccaaaaatttatagttatgaaaaggatgtggtacgtgttaataatttcagtgtttctagcaagcatgatttcgctgaatgtgaatttgagttttcaaaaaagtagtgagggtgattcaacgttggccttggaaaatatcgaggctttgggctccccagaagcaggagtaggtttcaagcattgcactcaagcaggaggatattgttttgagaatggaattaaagttcacggtatatcaatgaaggacgaatgaaacatctggtattatattgtttgttagggagtctttctctgggatgtgcggatcatcgcatagaggaagataacttgaatgctgttaaagatgaacgggttattactactcgtttggctgatatatcccagtggggaatacagaaagtgaacgggtttgcgaaacaaggaagccgggttgtcgtggaaactggggtggagtatggagggatcaagacaattgatttgaatcatccgggggcgatggatccaatggggcgtggtgaatcttcgaatgatcgtttccggagtttgagttcgttcaactcgttcgacggggagaccgtgacggccttggatttcaggaagggcgagctggtcgtgaacgcggtctcgtttcttgctcgttctggaaactcggagaccgtgattaaactcccctcgggtgaacaacacttgatcgcggcacgggtgggagatcgagtgattgccacggggttgtatgacgagggacgctacctgttgtattccttgccggatcaatccgcccgttattttctttcttacccggatcatcccggttatcccggcttgcgggaaaagacaaaagcgatgctttacgccagtaacgtgttgcgtgttcgtccggatgggggagcgtttgtttgtgccgacatgtatagcggggtgatcgatttttgccgggtgacggcagattctatcgagcgggtacgattggtccggttgcattacccggaagtcgaggtgtcggaaaccccttctccacgagtagtttattgtcaggggaaccgtttcggttttctggatgtcgcagtaacagaagataaggtgtatgccctttattccgggaaaacctacaagatggaccggggccgggcttttgaatctaattgcctgctcgtgtacgactgggcggggaacctgatacggacgctttattttggcgatgctttgacagggattagttatgaccggaaagagggggcattgtatgggatcactcaaggtttggaaatagggttaattaagttgaacttgtagtttttagaaaaagtcagagagatgttaatgcagctttgtaaaaaattagaagtagggatgttgcttttagcattattctatcttttctctcctttggtaagcgtgagtaaaacatgcttttttcaaggagtgaaggctggtgacatgatttttatacttgtgttttgtttgttatttgtttggtcatggcgttttgcaaaaaaagaatctttggtttttaaattgtcgggaatagatgttttgttgctagtgtgtgggttatatatcatcgtgttatacctgttttcttgggagcaactggatcgggaagtattactcatgcacgtggcgtgtggtttgttatatattgctgtccgtattttgggaatacagcaaatgagactggtattctggatatttctttttttacttttatggcagttgtggtatggtattgcttgccagactcaatatttttacccgggaaggggcatgcgtttagttcatgggagttttttgaatacaggtatgtggagttgtttcgtcgcttgcgtgggtataattttatgtggggaaatgacgctagtttcttctcgtgtggcaaagatgttttgtggtttaggggtatttctaatcgtgtacttgcttttcatgggaaattcacgagcagcatggctagggtttgctgttggaggggggtatttattttataaagaaacggattcgctaagaaggttgaaaaaatggggtatcttgttgctattttcgggagtgttgctgggggccgggatgggtacgtggcataaagtaaattcagccttaggacgtttgttaatttggaagatttccggtcagatgtgttacgaacacccgtggggaacggggttaaacgggtttcaacataattatatggcatatcaggagaattatttcgtgggagggggaaacgaggtcgagcgaatgcttgcggatgaaacattgtatgcttttaatgattttttgcgaataggcgtggagcaggggatttttggtttgttatttatagtggtattattatatct

SEQ ID NO: 384 - DNA, 4524 bp, Butyricimonas faecihominis
ctataatcttaaaaatatttattttcataaatatgctttgtaaattcatatattcaccatatttttgcataaaatttaatttatagttgattgattgaataaatatgcatgaattaaagaaagcccgtctcgttttagaagacgggacagtttatgagggaacttcctttggttacgagaaatcggtgtccggggaagttgttttttatacggcaatgaccgggtatccggagagcttaacagacccttcttataaggggcaaattctggttccgacttatcccatgatcggaaattacggggttccggtcgatgacgagcgagacggaatatccaagttcttcgagtcggacaaaatccattgtaaggcactggtcatttcggattactcttcccggtatagtcattggaattcacaaaaaagtctcggagattggttaaaagaacaacagattccggggctttttggtatagatacccgggcattgactcaaaagttaagggatcatggagcaatgttgggtaaaatactgtttgacaatgaagacataccctattatgatccgaataaagataacatcgttgccgaggtttccacgaaaaagatcatggaatacggaaacgggaaatataaagtggttctggtggattgcggggtaaaaaacaatatattgcgatgcttgttaaaacgggatgttacggtgaaacgagttccgtggaattatgatttcacgaaggaaaaattcgatggtatctttctttctaacgggccgggagacccctctcgttgcgaggaaacgatagagcatatacggaaagcattgaaaggaaatacccctatcatgggtatttgtctgggaaatcaactcatggcaagggctgccggggcctctacctataaattaaaatatggacatagaagtcacaatcaaccggtcatgaaccccggtggaacccgttgttatattacttcccagaatcatgggttcgcgatagatgagacaacacttcccgctgactgggaaccgttgttcgtgaacgtaaatgacggtacaaacgagggaattcagcacaagaaaaaaccttttttctcggctcaattccatccggaggcatcaagtggccccgtggacacggagtttctttttgacaatttcattgctgcaatgaaaacatcgaagaaataattgaaaggaatgttaatgataacactaaaataagaatgggtatagcaaaggtattgcttctgggatcgggagcgttgaaaataggagaggccggagagtttgattattccggatcacaggctttgaaagcacttcgggaagaaggtatttacagcgtgttgataaatccgaatatagccacggtacagacatcggaaggtgtggccgacaaaatatactatttacccgtgacaccggaattcgtggaacaggtgatcgagaaggaacgtccggatggtattcttctctctttcgggggacaaactgcattgaattgcggagtggctctttataaatcgggtgttttagaaaagtataacgtgcaagtactcggaacgcctgtacaagccatcatagataccgaagaccgggaaatctttgccggaaaattggcagaaattaacgtgaaaacaccgaaaagtattgctgccagtaatatggaagaggcgtttgccgcggtggataaattaggttttccggtgattatccgggcagcttacacgctggggggattgggttccggtttttgttcgaataaagaagagttggaacgtttggctgccagtgctttttcttattctcctcaggttttagtggaagaatctttgaagggatggaaagaagtagaatacgaagtggtacgtgataaatatgataattgtatcacggtctgtaacatggaaaacttcgatccgctgggaattcataccggagagagtatagtagttgctccatcacagactttaagtaatagcgaatatcacaaattgagatcgatagctataaaaataatccggcatataggcatcgtgggtgaatgtaacgtgcagtatgcccttgatccgaactcggaagattatcgggtaatcgaggtaaacgctcgtctttcacggtccagtgcattggcatccaaggcaaccgggtaccctttggcttttgttgccgcgaaattgggtatgggatacgggttacacgagatcaaaaactcgataaccaaagtcaccacggcatgtttcgagccggcattggattacgtggtttgtaaaatacctcgctgggacttgaataaattcgagggagtttccaaagtgatcggttcttccatgaaaagcgtgggagaaatcatggctattggacgatctttcgaagaggcaattcaaaaaggaatccggatgatcgggcagggaatgcatggttttgtcggtaacgtgttgaaagcgaaagatattgatgaagagttagtgaacccgacagattctcggatatttgccattgccggggctttcgacaagggatatagcgtagagaaaattcatgaattgacgaaaatcgatcactggtttttacaacgtttggaaaacattcacttgctaaaagaaaagttaagcaaacttgataaggaaacggatattcgtgaaggtctgttgcgaaaggcaaaacaatacggtttctctgatttccagatcgggcgattgaccgtgaagaatacctcgttatctcaccacgagaaaatgttgaaggttcgggattaccggaagaaattgggagtattaccctgtgtgaaacagattgacacgctggcgggtgaatatccggcaatgacaaattacttgtatgtcacctacaacgggtccgaaaatgacgtgaaatacgagcatgacgggcgttccgtgatcgtgttgggatcgggagcttatcgtatcggtagtagcgtggaattcgattggtgtggtgtgagtgctttgaatacaatacggaaagccggctatcgttcggtgatgattaattataacccggagacagtcagcacggattacgatacctgtgatcgtctctatttcgacgagttgtcattcgaacgggtgatggatattatcgaattggaagaaccgaaaggcgtgattgtttccacgggtggccagattccgaataacttggctatgcgattgcatggtcaacacgtgaagattttgggaacttctcccgaatctatcgaccgggcagaagatcgtcagaaattctctaccatgtgtgacgagttgggtattgaccagccccggtggagcgaattaacgagtatagaggacatttatcatttcgtggataaagtgggtttccccgtgttgattcgtccttcttacgtgctatccggggccgctatgaacgtggtgtcgaataaagatgagttattacatttcttggagttagcagcagaggtatcgaaagaccatcctgtcgtggtatctgagtttatcgaacaggcgaaagaagtcgagattgacgccgtggcgcaggaaggagaggtaaaggcttacgctatcagtgaacatgttgaatttgccggagtacattccggtgatgcgactatcgttttcccggcacagaaactttacgtggagacaatccgtcgaatcaaaaagattgcccgttccattgctaaagaactgaacatatccggtccgtttaacatgcagtttttggcaaaggataatgatataaaggtcatcgagtgtaatttgcgggcatcgagaagtttccccttcgtgtcgaaagtattgaaatataactttatcgatatggccacccggatcatgttgggagagaaggttgaatccttgaataaatcggtattcgatctggattacgtgggagtgaaagcctcacaattctcttttgcccggcttttaaaggccgatcccgtgttgggagtggatatggcatccacgggagaggtggggtgtatcggtgagaattactacgaggcaatattgaaaagtatgctttctgttgggcatcgtattccgaagaaaaatatactgatctcttccggtccgactcgttccaaggtggagttactgaattctacccggatgttgatcgaaaaagggtataatatttacagtacggcaggaacggctaaattctttaaggagaatggaattgatactcaaattctttattggccggatgaagataaggagccgaatattatggagtacttgcatgatcgaaggatagacttggtaatcaatatcccgaaaaatcacacgaaacgagagctggataatggctataaaatccgacgtgcagccgtggattacaacattccgttgatcacgaatgcccgtttggccagtgccttcatctatgctatttgtaaggtagatccttccgagatcgcgattaagagttgggacgaatactagaaaggtaaaagataaaaactaaaagataaaagttgaaaggggctgttcatttttttggacagccccttttttatattttgcaggatgtaacc

SEQ ID NO: 385 - DNA, 4515 bp, Butyricimonas faecihominis
gtactattgttccggaattaaccaattactaatcattaaatcaggattgacatggatactacctctcctttatttttagccttgctcgctaatggcccgatcaaaatggacgggtacacttatttcctatacgggggaaaaatcaggaaatgtaaatccaagcgaggccctagaaaatccagaacagaaggggagcgacaaacgacggatcgtttcacggaaacccgtaaaatgtggaaaatttaccgccgggcaatcaaggatttaccgatatggcgagttgaagcaagggcaagaggggtctctaaaagtgattccttattccactccatcaatggcgggtgcctacaaccgggtaaaggagtatgggcattcaaaacgtttcggttctccgtgggatctttggatgctcccgtgatcacggccgcggaacgcgagggatggacggtaaccctacactggaaaaacggggctaattgcccgaaagcggattcctctgactgggtattcctaggctatttctatgacacgttacgtcgttcaccccagttaaccttggattacatgccacgccggatagacgagaaaatcacgatcgaaattcctccggcagatcaaccggaaggaacacgattacatctttacctgtttttcggaaacgaagaatttacccaattttcaccgagcgagtacgtagaactatagacacgtctcaccgaacatgacttatttaccgggagaaccgggaaaaatggaattatcacaaaaaaataaattgcccctaaaagttttttgttcactttttaggggcagttctgttttatactaaaacagtctattttaaataaaacacatgttacattttttccactcggtcctttacggattgaatatccttcggatcgacatcacttgccgggttactcttaacaacttccaacacgtcattcaagagccttttagcctcctgcttctccccgattccttccaagaaatccgcacatccccaagccgtggccggggtacgatctaactggtaagcgtagtttatccagtcgatacattgctttttctctccagcattttgctgatcggtaatcttccagtaatgacgggtagcactgatcacgaaagaagacaatagtttatacttcacccctccaaacaagctcgccatacccatcgtcttctttatactcacgatcgcggcagaatcattcttcattttagccgaatcaatcaacatcttgaaatgccggtttgttatctcttccatttttctcagagaatcgatgctattctcctcctgttgagcaacgagatacttgttcatcaacgtcttgaatttatcgtccaaacggttgttcgagtagaaatccaaacgcaactgctctgccggaaggtaagatttaccgccacccatcatggcagacataccattctccagatttcccaacccggccttcacgtcaagaatcccttccaacgctttttcatctttctctttcacgcaagtagcaaaacaagcactcagacttttcatcacggaggcattcaagcggttgcccaacttcttattctctccctcaaccttcttaatgcccttaaccaaacgatcaaaaagaaccggatcgaaaatggaaatattacctatattattcacgttctcctccaacaacaattcctcgtcagagagacatttcaagtactcgttcaggacaacaccaccacctgccccggactctttcaacagagcgtaatactctccgaggaatacttttcctcgttttccttgctcgtattctttctccatcgccgcaatgcggggagccaaagcatgtaaacgcacggctttctccccctccgcgatcagtttatcagccgtacggacccccataaacttatacaccaactcgccctcggcattcacgaataccaacgtcgggtaagccgaaacctcgtatttacctgccaatcccggtccttcacctttctccgcgtcaatcttgtaattgacgaaattcttgttgaagtaatctcccacggtctgctgagggaaagtctccgcagccattttcttgcaaggaccgcaccacgtcgtgtacaggtctacaaagaccaatttattctcctgttttgctttctgtaaaacttctttccagctaccggtttcgaactgaatcccctgtgaaaacacgttccacgagaaaagcaaaatggctattgtaaaaagtattcttctcattattcctaccaatcgttattctccaaattgttccgcaactttttccatcaacaagtcaccccgcaatttggtagcgacaatttttccctccttgtcaatcaacaacatggctggaaccccgctcacgttatacaattttgccaccggacaactccatcccttcaaggaagaaacgtgaccccagtccaaatcattcttttcaatcgcatttacccaattatcctttttatcatccagtgacacgctcagtatttcaaatcctttatcatggaacttgtcatatactttcttcacattgggaacttcacgcaaacaaggaccacaccaagacgcccagaaatcaagcaaaacaatcttcccacggtaatcggataaagaaacattctttccgtccggagcttgtaaggtgaaatccggggcaatactaccgatggatgtttttttaatattatctatcgatgttttcaatttacgtcctaaataagcatttttgatacggggagtcaaaccttcatacattttttcaacttccgccaaatttctatccttgatcacgaaattattaataatcaacgcagttgcatgacaatcgggataatttgtaaccaaactgtcaatcgtccgcacggttttctccttcatagccgtatacatctgtattaaagagtcctgcatggcagtactcgtattctcatctctacccatgaaggaaagtcccaacatcatcaacatctcatcccgctgtgctaacagcattgttttaaaaatatcctgctccacgctccccgatatttctgctctgacattctcaatctcttttcccttgaccgtttttttcacggttacgcattttacatggattggaacagaatccaaaataatgatattcgtactaccatttatttccaaaatccgctcatccacgtctccaagcggcttttgcattttgaaactaccgtttgccacgactacggagtcctgtatttcatatttcttgtctcctaagtcctttttcaaataaaccactttcccatctccaccttcccactctccttgaatggtatacattgtttcctgtttagcacagcccacaaacaacaggcctatcaataatccactgacaatttttctcatattttcggaattactttaatatttctaaatcaaatatcatttatatttagttcgatttcttcaaaaacaattcgaactctttagctttctctgccttaatcttctcgtccatttttttgaactctttcgcttttgcgctattacctagtttagtatgcaaaacagaaagtgttccgtaataacaagatcttaatttagaactccccttgtcttcttcttcctgcaacttttcaattaaagccaaatatttttcaataacggctttatccgggcaatatgcggctagatattgagctgtttcatccaaataacgatcagaataccccaaagcctttatatcacggtaaatcatctgacattcatatacttcattccacttttgagccaattccaactcatatatctttatcttggcacgtaaggtttccgcacgtttcaaattcccgcgattgatcaaccgtaacaacgtgtccacttttcctgcggcattaaccaaacgcaatggggtatcctctttgtcaaacttaacctcaactacttgattaacggctctctctaacgcccaacccagttgcctttccacgttataacgatcaaacttcactttatttgccaaacggtctatattaaaaatcacgtagtcaaattgtggagaataaggatccttaatataagaacccacgaagtcccagatttctttttcctgcaatttttccacgggtatcgttttcatataatcgagtataattttctcgatatcatcttttaagaaagctccttccaaagcaacaacataatctttcaaaaaggcaagttcacgctctcctgccgcatatctgtccttataagtgaacaagcttttaccttccatcccggctttcattccggcgattaaaacatcagcctcttgaaaaccagccatctggtgtacaaccttcccctccttgttaatcaataggagtgtcgggaatccaatgatattggatttatactgtttgtataaatctttccccacacctttttccatatcatatttcacgttgataaaatttgcgttaaaaaagtctcccacatctttacgtgtaaagatgtctttagctaaggctttacatggaccacaccaagaggtataacaa

SEQ ID NO: 386 - DNA, 4492 bp, Butyricimonas faecihominis
atattagtatgctttcttttatttgtaggagagcaagtgaatgcacaagggatacggtttacagaaggaagtttttctgaagtgaaagctttggcaaagcaggagaacaaaccaatcatgttgtattttaaaatggcaggaggttcttgtgaacaactggaaaaagatgtgtttaccaatgtggaattggctgaattttataatgaacatttcgtgtgttatgcgattgatgctgccgataataacacggatatgttcatgggatacgaggtacatattgttccaatggttattttacttgatagtaaaaaaacggagcgttatcgcattgtccatagaataaaacctgatattttgttacgtttagggaaagctgtaacaggggaggctcctacattggaagagatgtttcaggcttgtaaattgaaagaatttgatctggttaaagcacaacaattattgtttgacgctccttattttatcacgatgatgcctcgggatgaaggggaaagatggatgaaaaaattgaaagacatttacgcaacttacgtggaaaagaacggggcagagaatatgttcaattctgtggattttaatattgttcggaattttaataaaacaccggcagataaggatccgcttgtagaatatctagtggccaattttgaacggtgtaaagagaaagttccggagaaatatttggtcgagtatttgttcgatgctcaaaataatttgatcttaagtatggctcggtcaggcaataaagagtatgttaaagctttagcccgggtaacgggtgatatgaagtatgtttatagttatgtagaaagtaaaataggagccgatactttattacgttatcaagcgggaggtttgtttcttctttttggtaataagaatcaagacgcttatgtacgtttgaaaaacgagtattttgatttgttgggagctagactttctgctgaagatctttataatgctattaatgaattgatgggggctacagaaggaaaattgacagaagaagcggcaactgtttgtgcggcttgggttgatgtggtattgggacagaaagatatttctgatgccgttcgtttacaagctttgatagcaaaaggtgattgttgtgctagtgtaaaagatttcggaaatgctaggatatgttataaagatgcttatatgctggctttgcaggtgcaggataaaagaatgcagcaatatgcaaaacagaaaatggctgatttagatgcttaatgtttgttgaatgacaagaagaaggatgttggtgcgtgcaaacttcttcctgttttcatgtaaaaatcccacgaagttgatactccgtgggattctttttatttgtttggttttattatttcaaccacttatccagccaagaggcgaaagtccgttgccataggattccgttctggcaacccaatacccagtgacattcttcggggaagtacaagtactgtgccgggatgccacgcatacgggctgcattgaaggctcccatgccttgagaggcgtcgatacggaagtctttttgaccgtggataaccaagatcggggtgtcccattctcccacgaatttgtgaggagagttgtcgaatgtacgttgagctaccttgttattcttttcccaaggagcgccgcccatatcccagttagcaaaccacatctcttcggtgttgtagtattgcatttccatgttgaagataccgcagtgagcgatgaatgctttgaagcgcttgtcgtgatgtccggcaaggaaatacacggagaaaccaccataagaggctcccacgcaacctaaacggttttcatcaatataaggttcttgcttcatctcgtcgatggcagaaaggtaatccttgatgttttgtccggggtagtcaccgctgatttgctcgttccattcttgcccgaatcccggtagaccgcgacggttcggggcaacaatgatgtaaccgttggctgccatcatctggaaattccagcgatagctccagaattggcttaccgtgctttgaggaccgccttcgcaataaaggattgccgggtattttttgttcggatcgaagtggggagggtagatgatccaagtcaacatttgtttgttgtccgtggtcttgatccaacgagattcaaccttacccatggttaattgatccaaaatccctttgttcacgaatgataattcggtgtcttttccggttttcgggtcaactttgtagatttctgccggttgactcatagatactttggtagcgatgaggtagtcgttcacgggaataaccgaggtgtaattgtgtacgccttcggttaatttggtgataacaccgtcattcaaggttaaccgatagatctcgtccgtagcgtgatggtctgaaatgaaatagatcgtgttgtcgtcaccccaagagagagccccaacattttgatcgaaatctttcgtgtattcttttttctccccggttttcaaattcatcacgaatagacgaattttgtccgcctcgtaaccgtcacgttccatgctttcccaagccatgagttctccattgggggagatcacttggttttgatcgtaacccatcatcccctctgtaaggttgcgggttttaccggaattcaaatcgtaaagatagaggtccgtgttggtagaagtcatgtaagcgattccctcttttttacgggccatgtagattactccttttccgtctttggtccatgtgatctgttctgtaccgccccaaggacgaacgggtgattcccatttttctccttccatgatgtctttccccgtggtaaccatttggccagggatgtaatctgccacgaaaggatgggtgtaagcctctacccagtcattccagtgacgatatacttgaccgtcgatcaagcgggcgtttgccttcggaagatcggggtgaagatcgtgaacatcttgttccagtttcacgtctttcaagaaaagaagtttggatttgtccggggagaaaataaagcccccgataccgccttcgatattggttaactgggtaagcccactaccatcggcattcatttcccataattgtacggaaccggatttgctggacatgaaggcaattttaccgtcggaagtccacgtctctccgaattccttgtaatccgtgtctgtcagttgttttgatttaccgtcggctaggttcatcacgtagatgtcactgtatgaacgatcttcttccttgttgaagtaagtcacgtcgtacacgagtgttttttgatcgggtgatacgcttacgctaccgattctaccaaatgaccataacacctcgggagtcatcacgtcggatgctagtttcatatccggtgttttataacttggttttactgcctctttcttgctgtcacacgacaccattgccaacaagactaatgcagaacataaataatttttcattgtaattttagctgttttattacacgattttcttatttcgttgtcggttgtacgccgttttccatggcttccacgattttttgggtaagctcttctgccagttccgggttatccatcaccagttgtttcacggtttcccgtccttgtcccagtttgctttcgccgtaagagaaccagctaccgcttttcttgatcacgttatattcaactccgagatccacgatttcgcctgaacgagagataccttccccgtacatgatgtcgaattcggctttcttgaatggaggtgcgactttgtttttcaccactttcacgcgggtgtggttaccgtaaatttcctctccgtctttgatttgtccaacacgacggatgtccagtcgcacggatgaatagaatttcaacgcgttaccacccgtggttgtttcgggattaccgaacatgacaccgattttatcacgcaactggttgatgaatatacagcaggtgtttgtcttgctgatggttcctgttaatttacgtagtgcttgtgacatcaaacgggcttgtaatcccatcacgctgtcacccatatctccctctatttcagcttttggggttagggcggccacggagtcgatcacgataatatcgattgctgccgagcggatcagttgctccgcgatttcaagggcttgttccccgttgtccggttgggatataaacaaattgttcacgtcaactcccagtttctctgcgtatgaccgatcgaaagcgtgttcggcatcgatgatagccgcgataccgccttgtttttgtgcctcggcgatggcatggatggctaatgtggtcttaccggaagattcgggaccgaaaatctcgatcacacggcctttcgggtatccgcctactcctaatgctctgtccagtccgatagagccggaagggatcactgcaacatcttccacgacattatcgccaagtttcatgacgctccccttaccgaagttcttctcgatcttgtcaagggtaagttgaagtgcttttaacttgtcttgattagtttctgtg

SEQ ID NO: 387 - DNA, 4487 bp, Butyricimonas faecihominis
attgaaaatattgtattaggtagtaatcaggtattgatcatctatcgtaaacgaattcagaattgacgttagcatgaataggcacgaaaggtagcatggagatttgtgttgatgttgatttattgggataaaattacttaatggagctgagtttcagtataaaagctcactaaatatcagtttcttttgttatttttgtaactcttgatggcatataactacgagacattttagaatgagatgatcgagataaataaaaaatgcttgcagagatatagcgaatactaggtgttaataaaattctaagtaacagagaataaggaaatggataattgtaacatagatagaaaattagatgaaagagcagaggctctattcgctagaatttctttattaatagagacggcacgcaaaaatattgcatctacggtaaatatcacaatggtatatgctaattttgaaacaggtaagtatattgttgaggatgaacaacagggggcgcatcgggctgaatatgggaaatctgttctgaaacagttatctcaaaaactaatagaaaaatacggaaggggatggtctgttgagaatttgacactctatcgaaaattttatttggtttatgcggattcggtaaacatgattgatccgattcagaaaaagtcacttggaaaggatttcgtaaacactgtttacgaaattggcaagtctgaaacgttctcgcaaatttctcaaaagagttttacgctaagttggtcacactatctgatattgatgcgcatagaaaatccttctgaacgtagtttttatgagatagaatgtgcacagcaacaatggagtgtccggcagttacagcgtcaagtgaattccagtctgtatgaacgtttggcattaagtcgcaacaaacatgaggtcgttcgtttgtcaaaggagggccaaacagtagaaaaatcattggatcttataaagaaccccttgacgttagaatttttaggattgaagtcagagacggcatattcagaaagtaaattggaaacagcaatcatagataagctacaagattttttacttgaattgggcaagggtttcctatttgaagcaagacaaaagcgtttcacgtttaatgaagaacatttttttgttgatttagtattttacaatcgcttgttacagtgttattgtttgattgacttgaagatagataaactgacacatcaagacttggggcagatgcaaatgtatgtcaattattatgacagatatgtgaagcagtcttttgagaaacctactattggcatcttactttgtaaagaacaaaatgaggctttggtgaaactgacactaccggacgatgctaatatttacgctacgcaatatgcactctatctgcctaataaacaattattgcaagcaaaattgaaccagtgggcagaagagtttaaagcgaaccatgatgaacttgagcaaccttaggtgtagagggaattaattcgtttattaatcggttaaaagcaacgtatttacagatatttgtgataaatttgtaggataccaaaacaatttatggaaatgaaatcaatgatgatctgtttttgcttttgttgtctgggcttttgggagcatacgctttcagctcaagaacaagttcgggcgctacggccgttggaacaatgtactttggttaccgatctggcggaccggattgaggaaatacaagtgatcccaattaaacagcgttttgatgccgagtcattggaatggatgaggaaaaaattgctgatcggacctgatggggatttgtttctcgtgtacgggcgggaggtgatgtgttttgatgctgccgggaagtatcaattttcaatgaaatataatcaagggaaagaatgtccttatcatcaggatgcctgtatcagcgtggatcagaaaaaattgttgtttgcgcatggagatagtgaagtcgtattttttgatttgaatgatgggcgtgagattgaacgcctcccgatgaacaagcctctacaattgtttgaagagattgccccggctccggatggagggttttattattattcgatctcggctccttgtaccaataattttgaacggggacacctcttagtgacccggtttgacaaaaacgggaaaaagttggagagttcaattccgcaggtagggttcacagtgaatatttttctcgtatcgcaggccgtaggtaatacttatctgattcgcacgcaaggaggtgataatgcgtgttaccgggtgaatacgaaaggagagttggagaaggcctacacctttgattttggcaaacgggggataccggatacttacgggatgttaaaaggtgatttgatgttacaggattacatgagggcagattattacaagatgccgatctatttgtgtgaaggcgggaaattcttttatttcaccagttgcggacctcaggcagaggcgtataattttctttatgcccggggtaaggattcggggatttattggaaagcggatcccgatttggaaattcattttctctcggcagatgaggactatttttacgcgcttttagaacccgttccggaagagatgacccgggagacgcaagacccgttattacggcagatatttaaacagtttgccctttcgttgggagaagagacgtctgcccgattggtgaaggtcaagtttaaatagccggggacgtgaatacactttcgtgtttagtttagctagttcatagaactgatttttgtggatgtaaccacataatttgccataattttgcgatttcatccgcaaaattttgaatgttcttgtcctttcccgtactgttaattataaatttgggtagttatatactactttacagtccattaaggtaatgcttgttttcatactcaaactcctccgtcacttcgtgccacctcctctataaacagaggaggtgctggtgactcttcccgaagacagggagtatttcaactctccctctgtttatagagggagtaccccgaaagggggagggagttagtttactgtaaactcgtatataagctccaaatttttcatttcagttccttacttcaacatatctatcccccttgcatccacgtctatttctttccctctcaaagaatccaccaactccggcaaccgcttgcgtttaactcgatttatgtaatagcgacaagtccattttttttatcggttattatttgcatataaggtactgcatacccaccaaaataaacaacatccttaaaatatattttcttcttccaaaatggacaattcgcatttttcacgaccaaggtatcatcaaattctataatataaaactcagagaatagcaatagacaaactggaaaagcataaaaaataaataacatccccacgatctttaaacatgaaaaactaatttcaactctagacaataggactataaatattgatcccaaaatataggatataaaaaaggaatgtacactatctcctgaccaaaaagaacctcgatatattttcattgttattgctttttacagaattatctatgattcttgttctctaccacattcatctaaaacattccatcccctccacataaacttcaatccccttctccctcaaaaaatctattatcgcgggaaatactatgccataaaataacaaatttggtaaaagtattatcaatccacaccatgaaaataatttcgcataatcaacattactcataacaaacaagacaagcaatatactcacaaccgtccatggtataaatattgcttgaacccatcgacctaaccaaaaagaatctcggaatattttcatatcaataaaattttcaagatatatacttcccattgtcaagacacattagaaaacgttggtactgggtaaacaactaatgtatcccaaaatttatacaaaacttttgggatacatcttaaaggatgatatatcccttagaatgaaaattatcattctaaaggatgccaactttcagccagatcaaggtatttatccatatctacattaatagaatacacgaaaagaacacttttccctacacgaatacatcggaatgggggatagtagataggaatgttcatcgtgtatttttgacatgcaattttcgcttttttgaatatatctacagcttgttgctctgtagaaaatcctatttcaattatgccaaatccttcacaccattcttcaggattttcatatattttacctcctagaagttctacaataaagatgttaccttgtgtaaaatcaatatttccgatctgtaattttttcttgattttctttattgaactagtgatcgtttctcggctttttttattatcatacaaaccttttgatttcaaatacacttctaattcacgtgcatacgatttgctctgtgatttttcaactgaatatatttctgttatacatctcttttcttgagctgaagagataagactcgttaaaaatagacc

SEQ ID NO: 388 - DNA, 4479 bp, Butyricimonas faecihominis
ttataagttaaaaactaaaagttaaaagctaaaaactaaggactaaaaattgaaagttaaatatctcattttcaattttcaattctccattttcaattcattaattgtcactcccgatttccttgattgcctcggtcacgttaatcgcgtaatccccgatcttctcgcactcgaagaaaatgtcactatatataatacccgtggcataatcatatttcttttcttcgattgccgtcaagtgttcctgttgcaggattgtccggtaatcattgatcgtttgctctacttcgtaagctttctttgccttcacttccttgtattcaatcgtgaggtttgcacacataaccacgagggcctcgtccacgatagccatcatgtgttgtaacttctcgtcgataaattcggggaattccacgttttgttcattccggcgtccaacagctttggcaacgttcaatgacgagtcggcgatactttcgatttccgacacgatcttgaacatggctctaacccgttgcgagttctccgtggataatttggattccgatactttcgtcaagtagtctgcaatttctacttccaccacgtcactctcgtcttccagtttgtcgattttattgaatttcttttcgaattctttcgagggagtgtgcagacattctactacttggcgatacatatccaatgtgttcttcgcgtagtgagaaatctcctgttttgcttggaacaaggatgcatccggggtagataataacccgattttgatatgtttcaacgtgaaggcatcgtctgccgattctttggatttgataatatgggtaacgagttttgcaatgaccttgataaaccagatcaaaataagcacgttggccacgttaaagcaagtgtggaacaacgatagcgctaccggaaccgaacccacgtttgtgaacggatctccaattcccaagtaaatactcaattgtccgacccagcctaaaaagaacgggaatatggctaaaacccatgcaaccccgaaaaggttgaacaggaaatgagcgaaagcggctcttttggcggtcgtgttggcaaccatggcagcgaggtttgccgtgatcgtggttccgatgttttctcccaaaaccatggaggcggcgatgtcaaaaccgatccatccgttggcacacatgactagcgtcaatgccatcgtggcagatgatgattgtatcagtatggtcagtgctgttccgataagcatgaacaggatataagaaccataccctaaatccgtgtaattatgtaggaaattcagaatctcggggttttcatgaatattcggcatgttttcctgcaggaagtttagaccgataaatagaagtccgaaaccgataatcaattccccccaactcttgcgcatccgttttgccgagaaaagcagcggtaggctcaacccgattaggggaagagaaagactgaccatactgatcttgaaccctaggatggagattagccatgccgtgaacgtggttcccacgttggcacccataatgaccccgatagaaccgataaggtcaagtaagccggcattaacgaaactgacaaccattacggtggtggctgaggaactctggatgatggtcgtgattaacaaacctgtaatcacccctttcacgcgattggatgtcattgcggcgaggatggttctcattttgttacccgctaccttttgcaaggcctcactcatcatcttcataccgaagaggaacacacccaatgatccgatcaactgcaagaaatcgagaatcgtgtaattcataaaatcgtattaagtgtaataaattgaatttgcgggtgtaaaggtatataaagtaaacaaaaaaagccccgaaaaggggctttttttatctaaattcctcgatgattacatcattcccggcattcctccacccatcggcggcattgcgggagcaggattttcttgtttttcctctaccaaaacacattcggtggtcaagaacattccggcgatagaagcggcgttctccaaggcaactctcgctactttcttcgggtcgataactccggtcttcatcaagttttcgtaaacacctgtacgggcgttgtaaccgaaatctttcttgccttcttttaccttgttcactaccacggctccttcaactccggcgttagcggcaatctgacgaagcggttcttcgatagcacgtttgatgatctctataccggtggtttcgtcttcgttctcgcctttcattttttcaagactttcgatagcacggatgtaagccacaccacctccgggaacgataccttcctcgattgcggcacgcgttgcgctcaatgcatcatcgatgcggtctttcttctccttcatctcgatttcagaagcggcacccacgtaaagtacggcaactcctccggctaatttagccagtctttcctgtaatttttctttatcgtagtcagaagtagaatgttcgatcaatttcttgatttgatttacacgttctgcaatagcctcttttgaaccgcaaccgtttacgattgtcgtgttctctttgtcgatcgtgatcttgtcagcgcatcctagcatatcgatcgtggctgtttccaatttcaagcctttctcttcagagatcacgacaccacctgtcaatatggcaatgtcttccagcatttcttttctgcggtctccgaatccgggagctttcacggcagcaatcttcaacgagcctctcaaacggtttacaactaaggttgccaatgcctcgctttcaacatcttctgcgatgattactaaagcacgtccggcttgagcaaccggttccagcaacggaaggagttccttcatcgtggaaactttcttgtcataaagcaggatataaggtttctcgaattctgcattcattttttccgtgtcagttacgaaatagggagaaatgtaaccgcggtcgaattgcataccttcaaccacttttacttcggtttcagtacctttggcttcctctaccgtgatcacgccttctttggtcactttttccatggcttcggcaatcaatgctccgatattgtcatcaccgttggcagagatacgggcaacttgacgaattttgtcatagttctcgccaacagcttctttttgtttctccaaatttttcactacttcagcaacagccttgtcgatacctctcttcaaatccatcgggttcgctccggcagtcacgtttttcaatcccacgttgatgatagattgagccaaaatcgttgcggttgtagttccatctccggcgtcatcacctgttttggatgctacttcttttaccatttgtgccccgatgtttgcatacggatcagaaagttcgatctcttttgccacggaaacaccatctttggtaatatgcggggcaccgaattttttctcgattaccacgttacgtcctttgggaccaagcgttactttcactgcattagccaattcgtcaacaccctttttcaataaatcgcgggcttcaacattaaattttatctcttttgccataaccgtttctaattttagattttaaatcttataaatttcgtgatttatgattttcgattaagtgattcactttcatggttttttatcctttcttttaatcactaaatcatcaatcgtcaatcactgaatcaattattaaagaaccaccagaatgtctgattgattcatcaccagatactttttgtcgtcgatattgacttcagttcctgaatatttaccgaataaaactgaatctcccactttgatttccatcggctcgtcgtgtttgccttttccggttgctactacgattcctttttgtggtttttcttttgcggaatcagggatgatgatacctgatgcggttttagtttctgcctctaccggctctacaatgattttgttaagaactgtcttaagtgccataattcttaatatttaaaagtttattattaattaattctttctttttaattgaaaattacgtttggagaagagcataattcgtgccaaacaaaaaaatgtcagtatgactgacatactgacattttctcgtgtcgattccgtgaatcgttattcttgttcttgtgaagtcgtgttattctcttcactcgttgtagtggtcgtgttgttattgttcattgttccgaaatcagggattgcttgtgttcccggagcggctgtattaatttgctcttgaatagcagatttttttccggcttgttcacctctggggagtaccattgcggatacaatacataaaacaagcattgccccagctaatgtccatgtcgctttttccaagaaatcggttgtctttcttacacccatgatttggtttgaagaagcaaaggaagaagataaaccaccgccttttgagttttgcaccaatacgatcaatataagtagagcgcaaacaataaagatcaaaatagaaacagctatgtacataattagttcttatt

SEQ ID NO: 389 - DNA, 4464 bp, Butyricimonas faecihominis
aaactaaactaattaattatgaagacagaaaatcctatcacaccggtttttgggacggatgaagaggcccgggtggcaccgaaatacgagatgccagagggtatgatgccgggcgaagttgcctatcaaatcgtgcatgacgaggccatgttggatggtaattcacgtttgaatctggcgactttcgtgactacatggatggatgattacgctagaaaagtgatgaccgagaacatggataagaacatgatcgacaagacggagtacccgcaaacggcggagatcgagcgtcgatgcgtgaatatccttgccaagttgtggaattcacctgagaaaccgtattgcacgggtacgagtaccgtgggttcttccgaggcttgtatgctgggtggtattgccgccttgaaacgctggcagaagagacgtaaggcaaaaggtcttcctatcgataaaccgaatttcatcatctcgacctgtatgcaggtggtttgggagaaattcgctatctactgggatgtcgagatgcgtatgattcccgtgacggcggagaagatcacgcttgacccgcaggacgtggtcaaggcttgcgacgagaacaccatttgcgtggtgccgattcaaggagtgacgattaccgggttgaatgataacgtgaaggagattaacgatgcactcgacaagttgaacaccgagaaaggttgggagatttgtatccacgtggatgccgctactggtgggtttatccacccgttcatcgatcctgaaacgatctgggatttccgtttgaaatgggtactttccatcagtacttcaggtcacaagttcggtctggtatatcccggtgtgggttgggtggtttggaaagacaagcaatatttgcccgaggaaatgaactttgccgtgaattatctgggagccaacatcccgagtatttccattaacttctctcgtccgggtaatcaagtattggcccagtattaccaattcatgcgcttgggtaaggaagggtacaagaaagtacagcaaaattgcctgaacgtttgtctctacctgaaagagcaattgaaaaagatgggtattttcgagttcttcagtaatgatatgccgaacccgttgtttatctggaaattgaaagatgatccaaaccggaaatggactttgtacgatttgtcggatgcgctgcacgtggaaggatggcaggtgcctgcttacacgatgccgaaagcgatggaggacgtgataatcatgcgtgttgttgttcgacagggcaccgggtttgatttggccgatctgttgatggaggacatcaaacgttgcgtgaaccagttggatgctctgaaagagccgacaaatagcgctctgatgtgggcgaagaaagaaccgcagaaaccgagaggttttaatcattccagataaacgtgctgtttgtcaactatttactatatagaggatcgccttggcagtcctctttttctgttgcttgatgattcttttatgttaatagctttaaaggtgttaacaggctgtttatcaacacgtgtacacaggtgaagaagtggttatgaacaggtggagaagtggtggagaaggaaaactgttaaggagacggtttgccgggggaagggcaacacggggctgtttgctcgatggctaaagtgatggcagggcgataatcgggaaataagattgtttttccggtaaattgtgttatctttgtttcaattagaatttcgaatattattgatcggaacgtttttacaagttaatcaggtttctcctttaattctccctatctctaatttgtcattttaaaacgaatgaattgaatttctgtgtcccgttttttttatcatggccggaagtttgactatttatacccatcctatctgtaaggacactagaagtaaatgatattattaattaaaataaattgtatggcaaaacctactacatttggtaaaaaagaaaacgagaagaaaaaacaagcccgaagacaggcaaaacaaaaccggaaggaagagagaaaacaatccggtaaagcgaccagtttcgatgacatgatcgcttacgttgatgaacatggcatgattacctcgacaccgcctgaagagcggcatgatgaggagaaaatcgtgcaagaggatatacaaatttcaatccccaggcaggaagctcccgccattttgaaaggtcgggtggagtattttgactcgcagaaagggtatggctttatcaagaatctggtagggacggataaatactttttccatgtcaataatgtccttgttgatatcgtggagaatgatatagtaacgtttgatttggaacgagggaaacggggaatgaatgccgtaaatatttgtacaataaataatcaattggcagtataaatcaattcacatgaaaaagaacacaaaccattttgaaagattatcgcaggctcaacaggcggagaatgcgttgaaagaacatagaaaaagagttggtgaggttgagtatgtcactattagcgggcgcacgactttcgaattcccggtcagtttatctgaagaagaaagagagatccgcaaaattataaaaaacggcacaagccgttagtctaaagggtcgtttgttcatcggccgtgccgttcgtttcttttctttttcgctggaatattgtcgtgacgtaagcggtgaatatcgggaagaaaatcatacccgcggcggcgagaatgacggcaaggatttgcccgatcttcgtgaccccgaaaatattcgacccgaccgtggtgacgttcatcagcgcccagtcgaaagcgtcccagtatgttttcacgggagggttaacaccgtgttccatgtagtagaaaatgatgctgcaaaaatagatcgtcgtgaaaagaatcgtcaggtacgtggcgaacaaattggtgatccggctgcgtgtcatccaactcacgatgagtgataccccgtaaatgcctcgtgccagagggattaaccgcaggattagccacgtggaatgggatatggtggttgataaaccgtacacgatattaaggtaaggaatcgagaccagcaagaaaaacaagttatgattgaaaaaacgcccggtccatccatccgtgtaccaccgaacgaaaaagtctgccagaaaaagcccgcacacccagagatggaatttcaatatgaaagcctcgctgagagcgttattcccgtccagtagttcgatagaggcaacaataataattgccaaactacccaacaatacaagcccgttgagtatttgctcgaaaactttacttcttttcatagaaaatgggtttataaggtccataaggagggtgtccaaaaagtcttatccagtatctacaaactaccccctccaactcccccttacacagggggagagttgatgaccaagcggtttctccccctgtgtaagaggggggtagtgggggtagttgtttaaaattgacttttgggacagcccctttatgaactaattgattacttccacgtgatctcccccgaagacattcacgtttaatttctgtgcgatatacttgatggcagcctgtgctttcaccgagtttccggcctcgtccagagggggggcgaaagcggcgataccgaacagtccgggaacaactccgagtacaccgccaccaactcccgatttagcgggaacgccactggtgtacaaccagtctcccgtgtgttcgtagaatcccacggttgcgatcagggaggtgattttaggagataacgatgggtcgaatacctgttgttttgtcacgggattcaaaccgttattggcaatcgtgcaggcggcgatggataattgttttgccgttacacccatcgagcattgccgggtgtacaggtctagcgacatatccgggtcatcgtaaatccggttgaaattcttcaataaccacgcgatagaacggttattgaagttcgtttcggattccgatttatagagttcatccagtaacttcagatcgctaccgcttaattcccgcatattgtcggtgattgccttccatttggcctcactgttacccacgggtttcaccatactgtcggcactgatggccccggcgttcacgagcggggtactcgggtgatcgttttccagtagaattgccatgattgagttaaacggcaaccccgtggcatccgccccgatcttgtctaacacggcttgcgccccatactggcgtaagactagaattgcggtgtacactttggagacggattcgataccgaaaacgtaattcgtgtctccggcctcgataacttctcccgacgggagacaaacggatataccgaataaattagaatcaattttgtctaggaatggaatataattcgcgtttttcccacccttcaaatccttcacttgtgcatgagcctcgttcactaaattcttgaggtcattgcttgtaattgtttttttcatacctgtgattatag

SEQ ID NO: 390 - DNA, 4433 bp, Butyricimonas faecihominis
cgtctatagtattaaaaatctaaataatgaaaagagacactcaaattttcgacctgattgacaaagaatgtcatcgtcaaaaagaaggacttgaattaatcgcatctgaaaacttcgtgagcgagcaagtaatgcaggctatgggatcttgcctgaccaataaatatgcagagggataccccggggcccgttattacggtggttgccaaatcgttgaccagacggaacaactggctatcgaccgggcttgccagctattcggtgccgaatttgctaacgtgcaaccgcattccggcgcacaagctaacgctgccgtgttctttgcttgcatgaaacccggcgacacgttcttaggtcttgacttggctcatggcggtcacctttcacacggatcacccgtgaacctttccggtattaactatcacccggtagcttaccacgtgaaagaagaaaccgggatggttgactatgacgagatggaacaactggctttggaacacaaaccgaaattaatcgtgtctggagcatccgcttattctcgcgattgggattacaaacgtatgcgcgaaatcgctgataaagtaggtgctttgctaatgtgcgatatgtctcaccctgccggattgattgccaaaggtttgttgaacaacccgatggaatattgccacatcgtgacaaccaccactcacaaaacccttcgcggacctcgtgggggtatgatccttcttccgaaagatttcccgaatccttggggattgaaaactccgaagggagagatcaagatgatgtcacaagtgatcaactttgccgtgttcccgggccaacaaggtggaccgcttgaacacgtgattgccgctaaagctgttgctttcggcgaggcattgtctgacgagtacacggaatatgcaaaacaaatgttagcaaacgccagagcgatggccaaagcattcgtggacaaaggttataaagtggtttccggcggtaccgacaaccattccatgttgattgacctgagaaccaaattcccggaattaactggtaagaaagctgaaaacacgcttgttaaagctgacatcacaatcaacaagaacatggttccatttgatacccgcaccccgttctctacttcaggtcttcgtgtaggaactccggcaatcaccactcgtggtttgaaagaggagcatatgcctatcatcgtggacatgatcgacagagtattgagcgccccggacgatgaagccgtgatcgcacaagtaaagaaagaagtaaacgccatgatgagtgacagacctatgttcgcttggtaataagactttctaaatatacaaagagaccgcaacatggattgcggtctttttttatttgttaattagtatttagtctatcacgagatttcacggtaatcttgcatttggatctcactatatctcaaggtaaatacaccggtatcccacctatgtctcgctaagaggttaacgataggttaacgatagattaacgataggtcaacgatacggggaattaatttgttcctgacatcatgttctcatacaatcatcatattaacgagactacggcaagacacgggcgaaatagactgtcaataccactacttcccacctcgttctttttttaccttccgggaattcttttttatatccttcagcccttttttcatcgcattatataataatgtaccagccgaacgagcaaacacaacttgctcgtctcccgcatccagtgtcacggatgctattattcgctggaaataaatccgggctcccagagaaacatcatacacggcaatacagacttccgactcgctcttctggtaagaaagtggtcccccgggataaatcagatcgctgacctcattacgtacttttcgagccgtggcagtcaccacatacttgtaatccgtcgttttcttcaacgtctccatcacttcgagagacaactcaaaagtgagtttgtcatgagacaggtatttcaaggatatatcattcaaaaaataaatagaatcccctcccatctttttcaattcctttaatagatcacgtgtcaacccttccttgtacatgagaggtaactgagtttccacgttcgtcaccaaccatttacccgtcgtgaaatccagacttttcggggactcgtataaatgcatataactgggagtagcacacgaaacaaccatcaccactaaaatcaataaaacgccatgcttcatcatgattcttattttatagtgtttccaatccttctctaaaattcttgtattttaaacaaggtaatagctccttcctcatccgggaagtatccccgtaatacgacactcgcccgatccgaataaaatcgatggttaacgggcttctaaccccgaacagtcgggaaaccaactcgaacactcgtgccgccgtattaatcatccataaaggcattcgccaaggcctacacgtgtgccagtattttgtagcctcgtccaagaattcttgcaaggtctgaataccctcatccccaacatgataaattccacgtaccccttcattcatgattgccgccctcgtcgcctccaaaaagtcatccgtggagatcaaatgaatacaagtaggctttctccaaactcccagcagggcatgacgagaaaaccaacgggccgcatcaatcatcaagatccctttcccgtaaaccatcccgactcttaaagcgacaggttcaaaaccgcttcgctccccatactcgaatagtaacctttcctcttccaagcgagtccgggcatgcatcgaaataggatttccgtccaatcttcccctagcgggatgattcggggttgtctcaccctccacgtgcgggaaactaattaaaataacccgctttacccctttttgaacggccacatccaataaatttttaaaatatagggtatttgtcgtctttaaaaacttttccggattatgcttgaaaagcaccccggcaaaatgaacgatagtatcgaccccattcaaagcatccctcaaactctcccgcacagcaagatccgcccggaacacgttcacattatctttcgtctttaattcctgacttacatctttacaatgaacgagaagatgcaacaacatctcgtctttcaacaaatgacgggcgagcaatcctcccaaatttcccgcggcgccggtgatcaacactcgctttttcatacctcacgctttactaaatcataataatacatatctatcacccgtccgtttttaatcgctgcatcacgcaaaatagcctgtctggtaaaaccaactttttccaacactttcatcgaggcaggattatactcgtaaacagaggcaaacaaacgaataattccggtttcccgaaacacgtaatcaaccagcaacgcaacagcctcgcccattattccccgcccccaatagtcctcacccagccaataaccgacctccgcactaagacgctccacatcagtcaagggtacgatccctaccccacccacggcctctcccgctacctctatggcaaaattttggacataaggctgggcttgtaccatccggatatacttatcggcatccaacattgtatacgggtatggaagtccatcccgcacgttattccatattttcacgttattaatatgtttcgctaacgagtctatatccgtcaacttccactcccgtaacctaaaattttcctgtttacttcttatttccattaagttcgctttataatgcaatccaaatttcaaaattatttattattctatatcttttttcaacgtctatcgtaaaaaagattataaatgagtaataaatccacataaattgtagaataatggggtatataaaatgttaatttgtaaccttttcgaaacaaaaaaacaatttccggtagtaaaaatacttatttttatatagatcgatagaaaaaaagaagaaaaacattgcaaatgcaatttatattctttaaatttgaaacaaacactaagtatgataagattcatattgcatagtattcttattcttgtggtaacacaactcagtaatgttgccatgggactgatcatgactgaatctcaacatacggcagagacctaccaactagcacaattacatgactccataaacaagggacaaagccttgattttcagagtcaatatcccagcccgttaattcggacttcacttgtcagcatgacaagatcagagttaccctgccgggttcgagtgatgctggacggagtctacaaacaggcaaatgaaagtcttaccattaataaggaaacagatcacacgggaatacacgaagtattcatatcgcaccccaagcgatatttccatgaactctgtttgttaattatttaaaacttctcgaaaatatggcacgtatcttgtactaatacaagatgtttacacgattaagtgttatcc

SEQ ID NO: 391 - DNA, 4369 bp, Butyricimonas faecihominis
tttatcaagtttaaatagatagattaacctaaattttataagttatgatgtttatatggtatattttgattggtattcttgccgggtatctggcaggaaaaattgtccggggaggtggaatgggtttgttggtgaacctgattgtgggaatcattggtggcgtgttgggaggctggcttttcggcatcatgggaatatggacaacgggtgttatcgggagtttgatcacggcgaccgtgggggcgattgtgttgctggcgattgtttcgttgttcagtaaaagaaattcgtagatatatgaaaaagaaggtccgaggtatttatatacttttatgcttttgcgtgtttacgcctttggtgttgcaagcccagacagacgaggagaagaggatattgcaggaacgggaggagatcagcaaacagaaaaaaggcggttccgtggtggttgatgagaggactgcattggagttgtttgataacacgccgagttttggcattttccgggataattatttcgttacgggggtgcctacgaaccggaagattgacaagcacagtgcggatgccaagtttcagatcagtatccggcaacgtctgacgaaaagtattttgcctttcaagaccttcttgtatttaacttacacgcagcgttcgttttgggatatttacgggaagtccagtccatttctggataataattttaatccggggcttagtttgagcaaagcgttgatctatcgtaatcaactgatgggaatagcggttctttcttttgaacacgagtcgaacggccgggattcgttggcctctcgcagttggaattacatttctctttcgggttcgtggtttattgattaccgtttttctgcccagatgaaattatgggctggatgggtcgataaagaaggaaatcccgatttgttgaagtataaaggctatggattcatggcgtttaactaccagagtgccgacgagcgcctatggtgttcggccgtgattaatccccgccggaagtttattaatatgaacacgacgttggagatcaatttcaagccttcaccgaaagctaacgagtatttctttttacaatactataacgggtatgcggagaatcttctggaatacgatcgttacgtgtcaatggtgcgagtgggtatttgtatcaagccggttttgagaaattactactaagttcataaagtccttactgattttagatttccactcacaagcccacgcttttccaactttttcttcccgttttcgtatattctattaacaattaaataataaagcgttatgtacaagttaatattggtacggcatggagaaagtgtctggaacaaggaaaacaggtttaccgggtggacggatgtcgacttgagtgaacggggcgaagaggaagcacgccgggcgggagaactgattaagaaacatgatcttttctttgatgtagcttattcttccgtgttgaaacgtgcgattcgcacgcagcatattttggcagaagttgtcgatcgggtgtgggtacccgaagttcatcactggcgtttgaacgagcgacattacggggcattacagggattaaataaagcggatacggcaaagaaatacggggaggagcaggtgcatatatggcgaaggagttttgatgtgacaccgccattgttggatccggatgattctcgttgtgccgttttcgaggataagtacagggatgttgatccggccgttcttcctttgggggaatcattggcattgacgatcacgcgggtcctcccgttctggcaggattatatcgcaccttcgttgctttctgggaagacggttctggtaacggcccacgggaatagcctgcgggcgttgatcaaatatctggatgatattagcgacgaggagatcgtcaagttggagataccgacgggtattccccaattgtatgagctggacgggcaattgcatcccttgtctcgtaaatatctggaatagatttccacgtgtgaagtgaaccctaaaagtaatacccggcttttggggttcacttcttttttgtaagtttgaggcaaattgtaaaatgaatcggtatgaaaattataacttataacgtgaacgggttacgggccgctttgtcaaaaggttttacacaatggctggaggaagaacagccggatgtcgtgtgtttacaggaaacgaaggcccagccggatcagatacctacactggaattcgaggcgttaggttacaagtcgtactttttttcagccaagaaaaaggggtatagtggggttgccatcctgacccgggtggggcccgaccacgtggagtacgggatgggtattccggcttatgatgacgaggggcgttttatccgtgccgattacggtgatctttctgtcgtgagcgtgtaccatccgtccgggactaccggtgatgaacggcaggcatttaagatgaaatggttagaggattttcagcattatatcggggagttgaaaaaggtacggccgaatctgatcttgtgcggggactacaatatatgtcaccggccgatagatattcacgatccggtgcggaatgccacgaatagcgggttcttaccggaagaacgggaatggatcgggggatttattgataccggttttatcgatacgttccgttacttccatcccgaagaggcagggaaatattcatggtggagttaccggtttaacgcccgggcaaataataagggatggcgtattgattactgcatggcgagcgaaagtcttaaatcccggctgaaagatgcttatattttgccggaggtgtatcactcggatcattgtccttgcgtgctggtgataggggaggttaaaagttaaaagttaaaagctaaaaactaaaagctaaaagtttagagttgggtatgaatgaaaaaagggttgatcactgatcaacccttgtaaatgaatacccttggttaagaaggtgtatgtgaggatcggcgtttgttacaaccgaagggtattcaaggatagccctttcattttttagaagaatgcccccggttagaaggtgtatgtgaggatcggcgtttgttacaaccggggggcattcaaggatagccctttcattttttttaagaatgccccggttaagaaggtgtatgtgaggatcggcgtttgttacaaccggggacattcaaggatagccttttcattttttagaagaatgcccccggtaagaggtgtatgtggggatcggcgtttgttataccggagggcattcaggaattatttttagtctggtttagtcatagttttaatttctttatttaatcaccttgtacgtgatcttgtaatccactcgtctcaattccgggaagaaatgtttcatcatgtacctatatggttttccgttgttcaaatccatgaggcgtttctctcttccctcgaacacgctgtagttttccataatcgagagtacttgctcttcatttggcatcccgtacaggagaatcaatctttttaatccgatccagtcttcccctcgccaatccacgtggtaaaggttttcggggaatgaatacctgcggagcaagtaattcctcagcgctctcgtgcgatctctggataacacctcgttctgcgcatatgatccctctggtgacgcgtagccggtaaggtaaattcccgtgatctcgtagtcgggattgctcgtgatagaatctagcgttaccctgattttgtccaactccttctggtttcttctgaaatcggggagaatgtaagtttggtttagtggaaaatccaagtatgctgaaccttccttataatatatgtttttctcgtcttcttccttttcgatagaaactatcttcacggttgtttcctcttggttttccagcttgatagtttgcgccagcatcttgatggaaatcagacgtttttccccaccacattcacagaagttctcccgtaaattcagtttagcgtccttcatccacgtctcgtaaggaacaaccacgttataggcaattctctcccggctccattgattaacgataaccgtcatgtaaatcgggaaagggggttgcccgtgattgaaagccaatgaccgttgataggctttttcccgtcttttcccgttaatcacgattgacgggagttcctcggacgctttttccgtttcaaccaccggggtcaggatgaaagattggtttttatgcacgggtaaaccgtttaagttcacgttcatctcgatataaacgctgtctccccgttgctcgaaacggttttgtataattttcacctctcccaaatatacttcctgagccttgagttccgtgaagaacaacccgacagtcaacaagaatatagtatatataaac

SEQ ID NO: 392 - DNA, 4361 bp, Butyricimonas faecihominis
ctattttaacaaaatatttagaagtctgttagaaagtgatactagcgtagagtccggggtgcttctggagtacggtaggggtgagtgtgatacgtgtacgaccgtagggtttggtgaaaatataggaactcccgatgcctattgcagtaccacaaagaatatcccaccaatcatgtttatcgcaataagtccgtccccaagcaacataagtggagaggagataagccggaataccgaatttccaaccatatcggcgttgtagaaaagaagctccttgaaaggtgacggttgcatgtccggaggggaatgcatgatggttacttccatctggccgttttttgtggatcgtatgttttaaaatgtagctggttccgacagccgtgaccaccgagaaaataagttgtttggttccttggtagtcttttttcaatagagtggtagctaaacagaagacgggagttgcgtaatatataacgtctccggaggtctctacagctttctgttgggccgaaacgttcgtgattaaaagtaaaaatagcaaaggtgatagggcaaattgaaaaataattgtcggcaatcctcttttcatcttattgataattaaaatgtagccgcaaatgtataaaaaatgtacggttttgagttgaaaaaaattgatttatcgttttcaaattacaaaaatagtcgtacatttgcacccgttatcgccaatttagctcagctggtagagcaacgcattcgtaatgcgtaggtctggggttcgagtccccaaattggctcgaatagaggcctgtctgatagacaggcttttgtatttaaacctaaacattatattttatgaaacgagttattgtaatttgttgtgtattgatgtgctttgggggagtacaattggtacaagcccaatcattgaaggacattttaaattcatcgaaggtaaaggatgtggtgaatcttgtaacaggtaacgtgattaaattttcggatcttcaaggaacttggaattacgtggagcctgcttgtaaaatgacgagtggggatttgttgaaagaggcgagtggttcgttagtgacttcggcgttggagaaaaaaatggtgaatatttacacgaagttggggattgtgccggggaatttcagctacacgtttagtagtgatagtacgtttactaatacgataggaaaaaaagtattaaagggtacgtattctttggacgagaaaacacgagtgttgacattacgttatatgttggcaaaaacgatcacggtgaaaagtgtggaagtacaattggtaaaatcgggggaacaagtatcgttgcttttcaatacggaaaaacttatgaactttgtcagtgtattatcctctgccttgaagaaatcagataaaacaactacttcgctgatggatgggtatgatgagattcttttaggatttgagatgaagaaatagtttgtcagatggcgaaaaagaagggactacctaacgattttgttgttagacagctccttctttccttgaatgaaaaacggcttagtaagccacgctcccccagtgcaaggagaaagtgcgatgctacttctcttttttcttttgaatgccgtattttaacgtgtcactgatgacttgatactcgatgatggaatctttttcgacaatcttgaatcgagcttcaccttttagtttcacggttttaaggctggacgtgtctttcgagtggataatcgtgtaagaaccggttgttgacgtttctgattttaaatagaccgtggtgccgtctgccagtttataagaggttacttttttggccggactcccggatgtgtaagtaattgaaacaacgccctctttccctttttctccatactgggtaatagcatatttatcttttagaatcgtgatcgtttcaattttgttaggatcaattattttcacggaatcggcagaaacttcttttccattgacaataaataggacgggaatctctgatgttgtactaatacatgaatcttggagtgttatttgacctattttgagaggaactgaagttgcttttactttttccgttttcaaaaaaaagtgtggcgttttgctttgaatagaatcctcgggcagggtggatctaaaggttgattctgtgattactgttttttgagccgtatcaacggccgtaagggaattatttacttcttttgcatcgagaattgaagtaatatcactaactttgatagttgaaatctcgtttagttcgttcgagatttcgggacgggcgaaagcggttaatgtgattgccgcaacgggaagtacgtagaggtacttcatccgggcccaaggactggatttttcttttaacatcatagttattcgttttttaagtttactgtgattaaagctgttggccatagagtagagccttgtgccgacagctttttttattaataataattgatactgttttgcgttgatgccttgacggataaccgtttcatcggcctcgtattcatgaatattctgtaactcctgtttcaagagccaagatgcggggttgaaccactggaaaatgatacaaatatcgctgatcaacaggtcgatggaatgtcgattgtgtacgtgagccatttcatggatgagaatttccttgctattttcctgcaaatctttctcggaaatgaccacgtatttcatccaactgaagggagcgatattcttgtcatggatgatgagggtaatacctttttctaacttttcctgccttccgccatgcaatagccggagcatatgaaacagtgaataaagattgcgtccgaggaagaaaagaattcccagcaaataaatacacagcaggacgagaagccacaacgggatggatgaagggagggcttgtacttctgtttgtggaacgtggtctgctagggtgagaatctgttcaatggttagtaacgtttgttgtacttccgattctttgggaacggttatttcacagaacgggataagcagggataacagtagaatacccagtaatgctatccggttgaaacgatggaaggtctctttgctgagtaataatctgtaaaacaagtagaatcccgttaaacagatggatgtttttagtatatagacaaagaaggtacccataaatagtttatttatcgtgtgctttttctacttcggaaatgagttgtttcaattcttccaatgaaatgtcctcttcctgcacgagtgaagatacggcactgaggtacgagttgttgaaatatttactgatcacgttcttcaaggtgcctttgcggaactcttcttcactaatgatcgcataatattgataggtgttcccgtaaacttcgtgagcgagataacctttttcttccagcccgcgcacgatggtggataacgtgttgaaatgcggtttcgggtcttcgtaaaatgcaagcatctgtttcacgaatagagggcctttctcccagaaaaagcccatgatttcttcttctttgctagttaatcctttcatggtttatttcttttgcaacaaagaactaaaatatttagttttaaaactaatttttatagttaataaactttaaactctagttttgattcgttattcttttatttttagatatttaatcttgtattttacccggatcggtagaatgtatatttaattttaatggagggtaggaagtcctgtaaaaatgtttatatttgtgtagtagtgtgcttgtggggaagttagtgaatatcgtctaattaaaattgaatgtaatggaagaatggtggagttctctggggttatttatgcaatcggtgtggtgtatcactctatttgccagtttggtatttgttatccagacaatcatgacttttatcgggatggatacggatggggggatggatgttgacgtgagtgcggatacagcgactgatggggatagcggtcctttccagttatttacttttcgtaacttcatcaatttcctactggggttcggttggtcgatcatctcttttgaaaaagcgatagaaaaccagttcgtgttgattctcgtgtcggctgtgatcggtgtgttgctagtgatggccgtgatggctattttcagattcatgagccgcatggagcaaagcgggacgattaacatggcaaatgccgtggggtgtaaagggaacgtgtatttgaaaattccgggagaaaaacggggagaggggaaagtacaaatctcgatacaaggggctatccgggaatttaatgccctgacagcaggcgaggaattggagacgggagcaccgattcgggtcgtggaagtgataaacgacaacaccttactggtggagcgtttttaaatgactatttattattaatcttagga

SEQ ID NO: 393 - DNA, 4346 bp, Butyricimonas faecihominis
cattaacaattgtgtgatatacaaatatcatctacccaatgaatgtgtgaaccaaaagcgagaaccctttcccggctccgaattaaccccgatgcggcctcccacctgttccacgatactcttgcaaatagataatcctaaacctgtgccatgagcaaaactattcaatttcacaaaacggtcaaaaatctgtttctgcttttcttcttcgatacccacgcccgtatccgtcactgatatttcaacctctccatctctcaacgtataccccacggcaatttccccggaagtcgtaaacttgaaagcattattcacaaaattggaaataacctgccgtaaccgattcttatcgctgtacacccagcattccggcaaattgggaactatacacaaatcaaccccggctggaactttcacccggagtgaagtcacgacatcctcacacaactggcgcacgtccacccgatcatacacgaattcaaaagtccccgcctcgattttcgataaatccagaatatccgaaattaactgcaacaacaactcgttattctcctccacgataccgatatattgcgcacgttcactttcctcttgggcataagccaataaattggaaaaacctacaatcgcattcaacggagtccggatctcatgactcatattcgccaaaaacgccgactttaaacgatccgattcctccgccttatccttcgccttgatcaacttcgcctcggtctccttcaattccgtaatatcataattaatacaaatcatctcgatcattccttcccgcgggcgataatccctcaccaacacgttcacccgcgtccacgtgtaatgcccgtcagcccgtcggattcgcatatcattccgtaaatgcgtacgtttcccggcaattacatccgacaagaaagtaagcatcaaaacccgatcctccgggtggaaatgcgagtgtaccccgataatctgcgatagaggcgtcccgatttcttcccccacgtttttataccaactatccaaaccgtacccgttacgagtcaaagcgttaaaatgcgcgtacccgacctgggcataatcgcccaccaacgtgaaaaaatccttgaactcctgaatctggttatacgcctccgtggcttccgtccggtccaagctaatcaacaaataattgatcaaattattttgtgcatcatacaacgtcgtcacttttgttagtaaattcaacctccccgtcttcttagaaacatagagaccattcaaattcgaaaaatcatacactagagaaaaactcacattctcccttctcttcattctttccctcatctcctccggtataagatgattttcaaacatattaattcccaatgcatcctctttcctagccaacccgaacatctcaaggtctttatcattcaaatcgacaagattcccgtttttatcatacaactctatcccgaccgggatattctgatatatattacgtaacaaacgttcactccggtccaacgcctcgtgggctgagaacgtgtcggtcatatccgaaaacattaacacgacctcatccttgcaaggagaatacatcacggcatgaaaatacttatttttctcttccagatgataatttatatcccgtacaaccccatttcgcatcaccctttccagatcaggcaaccgttccacaaaatgcgcatcaacctcgctagcatatttcccgatccaactattccccctcgtgttgtaaagaatctgagccatcgtgttcgaatccaagaaataatagtctttcacgcccccctcctcgtcataaaacaatttcatccgcacatatcccaccggcatatgtttaaacaaatcagccaagaactttttctcctcctgagccttatcctccgccttccggagttccatgcaaatactgataatattcaccatcgaggcaaaccactggtaatcctcatttttccacacgtgaggcttatccaaaatatctatacccgcatacccggacacgccgtcttttgaaaacatcgggataacaataagcgatttcaccccttgctccgtcagacgccttttttcctcgcttgcctcttccggtaactcatccaagctggcaaaaataatcggggacgcatttccggccaactgtttcgtccaccaaggaatattactcatcgggaatttctccatgtaattctttttcttgaaagacttgtaatttcccgcctcgtaacgacacgtctgcgtgcgattttcccaatcgtactctataatataggtacacccctccggataatgctgcataatatcgcccaatatcttattaataacactgctcatatccccggaacgaagcaatgaaagcaacgagcgagagatactattttgctgggcaaacaaattgttcacacgttccatcgccgtttcctccgtatccatattctccgggacatcaagacactccatgaaaccacaggttttcatattcccctcggcatctacctccttggaacacaatttcactcgtacccacacgatttttcctctcacctcgatcgggtaaatctggtcatatatattctgggtttttccaaaacgaaattcgttcaccgttcgtaaacgataatcctcccggatcaacttacgaaaatcaacaaaactgattatcccatcttcgcccaaatctaacaattctcgaagaaaatcagaacagacatactgttttttagagaaatcagcttcccaccaacccattcgtgccttattcaacaaatcttgaacacgtccactattgaaccgaccattattatccacgaccttacaaatttgattatattcaacgcctaatctcacaaaaatagtaaaatatccttcattccggctctcttttcaaaataaaacaggccgttaaatttcatttttcaatgcctctcgtattttagcgtaagcctctttcttgtaatgccgcacggtattatactccatgccaatttgttcggcgatttccctcgtgtcatatccttgtaaggctaattctaaaatacgacgctcttttcgcggcaagcgaccgatcaattcgtacatataatcatgagtatccacgactacaaactcggtcatcaactcgggtgataaatccatgtataccggacgagaattacgaataaaattcagacacaaatttttcaccgtggaataaagataggaacgctgttccgattcatttcgttcttccacgatcttgtcataaccgttcacgaaagcctgatgcacgatatcttcagcctcatcaggacaatagcgagcggcataaactcgcaattcatgcttcaacttacaatatagtcgagcaataatcttctctttctcttccgtcataagtgccgatccctacgaaattccccgttttctcacataatttcaaaacaggattaaaccttcgtttaataatcctcaaaaatagtaataataacacacaattacccaaataggtgcatttttttattcttccctcaaaatcaaaaacatacatcaaagatttctctttatagtcatcatcttgacgaaaataaaaatcaatattattaaacgaaccattaatgctccttttatcaagtacccctccaacacattttgatcatacacttcttgtccatttcaaccaagaagattttcgcttttaaacttttcaccctatatttgtgtggataaaattcccgacatgagcgactttgttaacggtatagatacatttaaagaactgtacacggattactttcaagccgtgtggggattttgcagcacttacctgaaggacagggaacaagccatggacgccacgcaggagacatttttcaaattgtacgaacgtttggataattcctacaccaagcaaaacgcaatcgcctttatctacatcacggccaaaaacatttgcatggacaacctgagacggaataaatttaaaaccaaagatgtcgagctattaaagaatgaattaccctcggatgactcgcttctggaagaaatcgccacccaagaaatgatccgatgcgtgcattccgccatcagccagctctccggacgcagccttgaaatcgccactctcgcgttagaaggtaaatcaaatccggaaatcgcagacgtactgggaatctctcttaactccgtgaaatctctcaaaaaagaaatgtacaccaaattacgaaagattatcggacacgaatatattatcctttttttcgccaagctcttgctacacgtagataaataaattctgcaagctcattattcccatatattttctataacttctgtcctatctcaaacccaattaattaggttttaag

SEQ ID NO: 394 - DNA, 4311 bp, Butyricimonas faecihominis
attataaatattccaagtctttattgtttgatgtgacacttccaggaaatgtatatttccataatagtcagtggcaaaatgtgatggaaatttctaatgaaggggtggaattggaagctttgtttgatatatttcgggattctgaagtaaaatggagagctaagtttaatatttctaggaattggaatcgttttgagaaatcttacacgaatatggatatggataatttagttgtagggcgttcgatatttggaatttatgcctataaggatgaagggttcgtgcaggatgaaaaagatattccggtgtatgcggatcaatcaggaaataaacaaggtttgtactttatgtacgatccctcctatccggtgcgtcctgggatgagaaaaataaaggatatgaatatggacgggatgattagcgacgaggatatgtattatgccgcttctgctttgccgatagcttatggtgggctagtaaatgaaattaaatggaaaggatttgacgtgaatctcttgttaacttactcgttaggaaggaaaatggtaaatgcttatatggaaccttcgttggcatttaataagaaatttggaacgatttttagtaattatctgaaaaaaacatactggcaaaagcctggtgatgtgactgatttgcctttactggaagcagggtcaactaattataccggacaatatgcagggggattggattctcagatagagaccgtgaattatttgagaataaagcaattgacaataggctataatgtacccaaggcgattgtgaagaagttaaatcttgatggtattcgagtgttcttcactggtgagaatttgtggttatggtcaaactattcaggtgttgatccggaagtggtggatccgatgacaggtgttgacaatggggtgaattatccattggctcggaaattaacattaggtttaagtgtaaacttttgattatgagagtatatatttttttgttgtgctgtgtttgtttaacagcttgcgattcgttgttagacgttgtaccagaaaatgctttgacaataggcaattatttgaaagatgaaaaagaattggaatcattgacgacagagatgcatagtatcgtaaaattatgtttcactgattttaatgcccattatgatatgggtgaattggcggataaagttgaatctctgaatgaagtgagaaatttggttccttcatcgttagatgagaatggatctatatacgtgagttggaaaaatcattatgatgctatttatttggctaatttgttgttagagaatgtagagaatgttcgtaatgtgtcccaggaacggatcgattttcacatgggacaggcttatttcgtgaaagcttttttgtattttgaccttgctcggcgttggggaaatgtaattataacgaaaaattcttattcaacccaagcttatgcaacaagtccagttctggaggtggtcgatacggcaatcgcaaatgcggaaaaggcttttaaattacttccactttttgaggatatgaaagatatctccggcaaaaaaatgacagtgaagcaatttggttgtaagggatctgtagccgcattattagcacacctttatgcgtggaaaggaagcgtgattgacttgtatgattttacaggagactcgaaaacgtgttacgaggagtctgtaaaatggtgttctttgctgatcgaaaagaaagtcggtcaatataaattggccttaacaccggaagaactttgcgtacaactctcggattcaaagggtgtaaacgaggaaagtatttttgaattcatgtttgaccgatattcagcagagtatccaacgaatcgagttcctgcttattattacgtgaattggcctgtgaataaatattctagcccaggtgaattctcaacggactacaggatctcgttccgcttttataacgagacgatccgagagatgtatgatgaaaatgataagagaagagaagctttcttttataaatttgaagaagcttctcaagaaaaatcggaatattatacaggttatgcgtatttgtataaatggcgtactcctgtttatattccggacgagtatgaaccttctggatttgtatttgcagcgtttgatgcaaattatagttattggagattggctgatatttatttgttaagggcggaatgttatgtgaaattaggtgatataagggcgaaagccgatttgaacgagatccggggacgtgcgggggctactctttatccagctccggatgatggaaatttacaatatgcaatttttaaagagagagaaaaagaactgataggagagggacatcgttattatgatattattcgaaatcaatattttcgaacagaattaactccggcgtttacaaatttatcagacaaggacgtgaaagatggtgctttatatattccaataggttctgatgcgcaggtgctaaatgatgtgattagacagaatcgttattgggccaaatttttctgatgttgaattgtaaaaagaaaatgtaagatgagaagtatagtattttctgttgttgtgttgttcttgttttcttgtaacacgaaatataatattattgatactggcttggcaaatggcaagtttgccgggaatatgtatgaatatttacaatcgaatcattatgattgggatagtactgtcttgatgataaagaaagctgatttagtagatttatttgaagggaaaagagctggatacgagaaaattactttttttggtccgacgaatcactcgattcgaaaatatatgttggacaatggatatacctgcgtagatgagatgggagaagaactttgttatgaaatgattatgaaatgtgtggtgaaagggaaatatatgcgggaggatattccagctggaaagccagtggtgaatactgatactgatgatgaatggaatgataaattatctgaaaatcctgatgtgtattgtggggaaggaggcgtgattttcacaggggagatgggaaatcgtttttggatttattcttttcaagaatcttatgaaaaggtgcctggagttggagcagttgttctttatatcgtttctttggaaacgggaggaacacagatagatgttgcttcaacgaatattgaaccgacaaatggagttgtgcattctttgcattataattttgttttggggaatctgtaataaatgatcgtactgttaattgaaggttatgaaactaaatctgtgtattatttttttgatattcatttcttggggatgtcaagatgtgaagattggatatttaaaagctgataatgctgaatatgatcctgcttttatggttattcggaaagagttggatccgatagaagatgctcttcgaataaagaatgagactaactgggtttctccgaaaatacaaggagtgttaggcaccaatccgttgaattttaagctgttagatgtgattatttctgacggtggggataaagaattgtttaaaaaggagttaattgtacggggggctggtattatggaattgcctttgtatacgaaacttccaaagggagaatataaggttacattatgtgtatataatgaggattactctgcaaatttgaaagatgtttttacttttattgttgaataataaagatatgaaaatgaaaaagggtattttaatattttttgtttgtgttataaatgtcataagtgctatagggcaaggaatttccttttttaaaggtagttatcaagaggccgtggctactgctgcggcaaatggtaaaatggtttttattgacttttacacagaatggtgtggaccttgtaagttaatggcaaaagaagtttttactgataaaaaagtcggggagtattataataaaaaatttgttgcgatacaattaaatgcagaagacccagtaaatagatctattgtgaagcaatttaaagtgaaagcttatccaacgttagcttatgtgcaaccagatgggaaacttgttatgataagaacgggagctttgccaattgatgaatttttgaaaacgggtaaaatagctacaggagaagaattgagttttgaggaactctatactaaatacaaaagttccaaaaatgatttgatgttgcttcaacaagttttaaaggaggctcccgcttttattcaaatgcaagaaggtatcgagcaggaaaaatgggatagtcgtattcataaattgtatgacgagtatataaaacaaaaaatgggaccggagttaataaataaaacggattacaatattattttaagttttcatgataacacgaaagag

SEQ ID NO: 395 - DNA, 4305 bp, Butyricimonas faecihominis
tattcatacatcatggaaaatagaataacaaaacttttcaatataaaatacccgatcattcaaggaggtatggtatggtgtagcggctggcgcctagcctccgcagtaagtaacaacgggggattaggattactaggagctggctccatgcacccggaagtactggtggaacatatccggaagatgaaagaggccacggataaaccgtgggggatcaatgtcccgttactttacccggaaattgaccggcttatgaatatcatcatccaagaaggtgttaaaattgtgttcacctctgccggaagcccgaaaaaatggactcccctgttaaagtcgcatggtatcactgtggtacacgtgatcagtagtaccctgttcgcaaagaaatgcgaagaggcaggagtagatgcggttgtcgcagaaggttttgaagccgggggacataacggacgggaagaaacaaccacgctcaccttgattcccaatgtagtggaatcctgttccctccctgttattgccgcaggaggaatatcctcaggaaaatccgtggcagccgccatgactctcggagcggaaggagtacaaatcggaacccgttttgccgttgccgcggaatcttccgcccatccgacattcaaacaacgggtatttgacacggaagaaggtggcaccatgttggcattaaaaaaactcgcccccactcgtctgattaaaaacgacttcttcaatcaggtaaaagcactggaagacgccggagctgaggccgcccaattaaccgaacttctaggtaaaggacgggctaagaaaggaatcttcgaaggtgacatgacggaaggcgagttagaaatcggacaaatcgcatccatgttgcacaaagaagaaaccgtggctgaaattatggaagatattatcgctgatttcaacaaaacaacaagcaaattgggcgatctgaaactgtgaaaatgaatttacatttatgataaaatttacacgccacaccctagacaatggcttaacaatgatttgtaacacggataccagtactccatttgtatccgtgaacatcctttataaagtaggtgcccgggacgaagatcccaatcgcacgggctttgcccatctttttgaacatttaatgttcgggggatccaaacacatcgcagattacgattatcacgttcagaaagcgggcggggatagtaatgctttcacgaataacgactacacgaattattacatcacgattccggctcccaatatcgaaacggccttgtggctagaatcagaccggatgctagcactcgatttttcccaaaaatcacttgacgttcaacgcaacgtggtcattgaagaattcaaacagcgctacttcaataatccttacggggacatttggttgaaattacgtccattagcctataaggtacatccgtatcagtggcctactatcgggaaaaacattgaccatatcgcaggggcatccttagaagaggtggaagacttctttcatcgtttctatgccccggataatgccatactaagtatcagtggtaatattaccgacgagaaagcccttgaactcgtgaaaaaatggttcggggacattcctcccgcccgttataagagaaaagcattacccatggaaccgcaacaaaccgaagagcgtcgcctcgtatgcgagcataacaaagttccggcagatgcaatctataaagtataccacatgggcgaccgccgatcggataatttctacacgtgcgacacgatctcggacatattatccaacggtcaatcctcccgcttgtacatcaacctcattaaaaacgggaaattattctcggaagtagacgcttatatcaccggggacatggatccgggattattcattttctccgggaaactctcggaaggagtagcgatagaagaggctgaagccgccatccaaaacgaaattgatcgttttatcgaagacccgatttctgaacgggaactccaaaaggtaatcaacaaaactgaagcccgaatctcttacagcgagatcaattatcaaggaaaatcagccaacttggcgttttttgactatctgggagatattaacttgattaattcggagtgtacccgatacgcagaagtatctcttgattcgataaaacagaccgcccgagaattattctccgcacagaattgctctaccttgtggtatcttaaagacaaataattgttatttttatgaataggaatatagaaccgtccatcactgaaatctcccgtccatcgctgtgggggcatcaacaaatcacgcttcccaatggaatcgaaatcgtgtaccttcacgatcccaatcaagaggttttcaagatggacgtggtactctcagccgggatttacaaccaatcccgtccggttgtcgcatcaagcatgattaacatgctcaacgagggaacccgtcaacatacctctgctgaaattgcagagctgtttgattatcatggagcatacgtggatttcaattgcggtatgcacaaagctgaattaagcctgatttcgcttaataaatacgcctcgcaaaccattcgtatgctggcagaaatgacacttgaaagtacattcccgcaaaaagagctggaaacgtatatccgtaatcgaaaacagcaacatctggtaaacatagaaaagacctcttaccttgcccggatggaattcatctaccgtatgtatgggaaggaacatccttatgcaaactgtttcgcactggaagatttcgaccaagtgacaccggaattattacatgatttctactgggaaagagtgcaggcatcacaatgcagaatcatgatttgcgggaatgtcagtgataccgttttacaagaagtaagccaagccttttcgcccatgagcagtaacccactaccaccggataaagtttataccatgcgaccaagcagccccggtaaatatcatgtctcgaaacccgatgccgtgcaaaccagcattcgcatcggaaaaagtggggtaaccttattggatgaagactacacgtatttccagcttttaaacatggtactcggtggctatttcggttcccgcctgatgtcgaacatccgggaagaaaaagggtacacctatggcatcggctcatacaacgttaccatgccgcaagcagcccactggatgatcgcaacagatgtcaatgccgaggcaaccgaggccacgataacagaatgtataaaagagattcgtcgtctacaggaagaactcgttcccgaagaagaattaagtctcgtgaagagttattttaacggggaattattacgagaactagacggtgttttctcccagtccgatgccttgaaacacaaactcaattacgggcaagataacacgttctatctccgggctatcgacaagatccgttcctgtacccccgaagacattacgcgtctggcacaaaaatacttgaccgtggacgatatgtatatcgtgacagctgggaaaaattgaaacctcccctatccactccatgaagtcattttaggtgtggataggggaggtcgcccttgaacgcctctcgggagtattttattgcaacatgaaatttatcgggatcgtgtaggaaaccctcacgggcttacctttctgaattccaggtcgccatcgaggcatttcctgtattatccgacacgcctcataatccaaagaaggataaacgggacgaagaatttttatttccgacacgctcccgtctttctctataataaattgcacgtagactttcccttgaatcttcatttccaaggcatctttcggatattttatattccgcacgatatacatttccaccccctcgcctacaaattgcggcattctctcctcgatatattcctcgtcagtcaacaccacttgcatctccttgtcaatctttgcacggacctctttatccatcttgcccaaaagagaaaccacgagtttcgtccctttcttaaccgccagcgagaatttcccgtccaccccggtatatattctctcgttcgagtttttcaccatgacacaagccccgcataagggctgtttattcttatttaccaccatccctttcgccacgaacttcaccgaatccttttctgccgcttgcagacaagtagttaaaaacaaaattcccaacatggaaaaaaacgggatacaccaatcccatttcatctttaaacctcttttcccctttgtagtcataacgaacctttttaataattaataaatccgccaaaaacaagctcaagccacacacctacttcaacctgttcctatacc

SEQ ID NO: 396 - DNA, 4303 bp, Butyricimonas faecihominis
tatttgtacaggaacgaattttaacttatcttggctgttgtgtttaaaaatgcgtttatgaaaaaaatcagttttgtttcaattgtagtattgtgtattattttgcttggcggatgtgccagtgaaccgaatcaagaggtgaatattattcctcagcctcaacaggtaacagttgcggatggcggtttttatctatctcccaaaacagtgattaacgtggtgaagggtgcggatgatttgcagccggcttgtacttttatgagtacattggttgaaaaatctttcgggaaggccttaaccgtggcgaatggagaaacgaaaaagaatgcgataaatatttttgttgacccatccatgaaagcggatgcttatgatttgacggtggagaagaatgcggttaatataaagggaggaagttcaaaggcggttttctatgccatgcagagtttacggcagatgatgcccgtggacgtggagaaaggagagaagatggatcggatcaggattcaaaacgtgcagattcaggacgagcctcggttagggtatcgggggacgatgctggatgtgtgtcgccatttcttcacggtggatgaggtgaaaacttttatcgatatgttggctttacataagttgagcgtgttccactggcatttgacggatgatcagggatggcgtatcgagatcaagaaatatccggaactcacgcaaatcgggagtcaacggaaacagaccgtaattggtaaaaatacgggaaagtatgatggaactccatacggaccctactttttcactcaggaagagattaaagaagttattcaatatgctgccgatcggtatatcacgattattccggaaatagagcttcccgggcatgcgcttgctgctttggctacttatccggaattgggttgtacgggtggaccttacgaggtatgccagatgtggggagtgttcccggaagtattttgtcccggtaacgagaagacgtttgagttctgggaaggtgtgttggatgaggttgcggaattgttccccggagagatcatccatattgggggagatgaatgtccgagagatgcttggaaaaagtgtaagaaatgtcaggcccggatgaaacaggaaaagatgaaggaagagggagaattgcaaaattataccgttcaccggatcgaggcgtatttgaaagagaaggggaagagaattctcggttgggatgaaatattggaaggagatgtttctaaaacggcgattgttatgtcatggagaggtaagactggcggaattaaaggtgcaaagagagggaacgaggtggtgatggtgccgaatgactacgcttattttgattactatcagtcaaaagatattgctaatgaaccttttgctattggtggttttgtggatgtagcgaaagtatatagtttggacccgacagagggattgacggccgaagagggaaagaagattatcggggtacaagctaatttgtggacggagtatatcacgacttttagccatgctcaatatatgttattgccgcgaatggccgcattggcagaggtggcatggactccgcaggaggcgagagagtactcgaatttcttgaaccgggcgaagttgttgacgcaacgttacgaggctttaggttataatttcgcaaaacatattctacaagagtcaaagtccaatgaataaaatagtttggatgctgtttttcggttgtatcacctggggaatggtcgggtgttcaaccgaaaaagagattcgtacggaactgaattccggttggcaattccgtcagagggattcggggacgtggttacccgcaacagtacccggtacggtacacacggatttgttggctaacgggaagattgaaaatcctttttaccggatgaatgaattgcagttgcaatggattgataagaaggattgggagtaccggacggagttcacggtttcggaggaaatagggaaaaaggtcaatcaacggatcacgttcacggggttggatacatacgccgatgtttatttgaacggggagaagttgggaagtacggataatatgttccggacgtggaggtttgatgttgaaggaaaactgaaagttggtcgtaatgagttgcatattgtgtttgcttccccgactttgaagggacgggaagagatggaacgttacggtttgagactacctgcggataatgatcagagtgttcggggggagatgggaaatgaccgggttagcgtgtacactcgtaaggctccttaccattatggttgggattgggggcctcgtttggtgacttccggtatctggcgtccggtgattctggaggcttggaatgacgtgaaggtggtggatgtgtttattcgccagccttccgtaacaaaggaaaaggctcaactggtggcggaggtttgtgtgaactcggacaagcaacagagtgtcacgatagcgattatgaatgaggggaagatgttgttgcaggagcaaaaagagttaagaagaggggaaaacaaaatatctattccttatgtaattcagaatcctcgcttgtggtggagtaacgggttaggggaacagaacttgtacaatttcacgattctggtgactagcgaggaaggtgttgtgtcggaaaagaaggtgacgacgggcttgcggtcgttgaggttagttcgggaaaaggatcaatggggagagtctttcggcttcgagttgaatggagtacccgtgtttgccaagggggctaacgctatcccgaatgacgtgttcttgcctcgtgtaaccccggatttgtatgaaaaaatggtgttggatgcggcgaatgccaacatgaatatgatcaggatatggggtggcggtatatacgaggatgatgcattttttgaattctgtgataagtacgggatcatggtgtggcaggatttcatgtttgcctgcgcgatgtatcccggaaatcaagagtttttggataacgtgcgtcaagaggctattgacaatgttactcgaatccggaatcatcctagtatcgctttgtggtgtgggaataatgaaaacgctttggcttggcgatatggtgcgcccgggggatggggatggaagaacgctttcacgaaggaggaacaggatacggttttcaaggcttactatactgtttttcacgagatacttccccaagtggtgaaggattacacggatggggatgattactggccttcctcgccgatggcgggaccggaaccggatcaacatggtttggacgggacgacttcgggtgaccagcattactggggcgtgtggcatggtttccgaccgttggaaagttttgacgaggtgactacccgtttttgtagtgaatacggttttcagtccttcccggagatgagtacgatagaaacgtatgcactaccggaggattatgatatagaatcggaggtgatgaaatcacaccaaaggagttatattggtaacgggcgtattttggattatatgaaaatgtattactgggttccggaagagtttgaacagtttatttacatgacccacgtgttacaggggttggctacgaaaatgggtatcgaggcacatcgtcggaatatgccttattgtatgggctctctgatctggcagatcaatgattgttggcctgttgccagttggtcgacgacggattattatcataaatggaaagcggcgcattacatgatgcgggattgttttaaagaggtgatcgttgctccgaaatgggagggggattccttggcaatttatgccgtgagtgataggcaggaaatgattcaggggaggctggtcgttgaggtgctggattttcaaggaaattctatttcctctgtagaaaaaggagtagatgtgacggcaaatacttcaaccgttttgtggaaattgaaccgggaggtattgcttgcaggaggttcggagaatgaggtggtgcttgtggtacgtttgcaggaaggcgatcaggttttagatgaaaagaatatttatttcgtgtatcataaagatttggatttaccgacacctcatttttctgttcaggccggggaggaaaatgatgaaaaatttattcaggtatcctcggataaactggcttgtaatgttatgttctgtattccgggagaatcggctttcttttcggataattatatagatataattccgggaaggaattataagataaaagttgacacggatttatctccaacacaaatacaggagcggataaagatacgctatgtacattaaaatatgaaaactctttgaccacgtgtcaaggagttttttttc

SEQ ID NO: 397 - DNA, 4299 bp, Butyricimonas faecihominis
ggtttataaagtttataaggttcataaagtatttacagcgttttaccccttgtacacgatgatttacaataaatgtgccaaggagtcttttggttatgcgaatacttgaaatattactttataaactctatttcaagattgctttataaatgacctcttgaatttttgtacggatattatccttgataagtttgtcgttgaattcgttggggtaaatccggttggatagaaaaatatagattaattggttgtccggatcgttccacgcaatggttcccgtgaatcccgtgtgtccgtagctggtacaaggggcttccttgcaggtcgggcctgatttattgggcaaggtttccggtttgtcgaatccgagaccccgtctgttttggtcgagaggtaattgtgtttgagtgaaaaggtcgattgtcgtagaatcgatgagacgttcacccccgtatgtcccgcgatttaggtagacgctcatgattttggctaggtcttccgctgtggaaaacaaaccggcattaccggacactccgcccatgagtgctgctattgggtcatgcacgtacccgtgtaattgggattttctgaaaatatcatctttattggcgggaaccacttttttcatgtcgagattaaaatgggcgttgaagtccgtgttataggctcccagtcttttaaagaaatgtttccggcaataaacatcaaaaggtgtggcggactgttcttccacgatgtcttttaatagtacgaatccaaggtcgctgtacgtgtattttttctggggtagcagtttggagtttaaaatcaagtcgtgaatggagtcttggaaatgcttgtgaatatagaaatgcggggaaacgaccaaatagccttcgccccccgtgaaattaaacgtgctgtcccggtacgtgaatttgggattcaggtaaagtcgatcccggagtttacgggtattggttttcgtgtattttgtcgtgaacaaccgaccttgcattttatcccagtcaatggcgtgctggaagaaagaaaaagatgctcttaatccggctgaatgtaacaacaattccttgacggtaatatcttgcttgtcagtttcccgaagagagtatgagtaccggacaatcggggagtcgagtgttatatattgctggtcataaagcatcatgacagccggaagagtagccgctattttcgtgatggaagcgatgtcgtatatgttgtcggtcgtgtttttcttttttctatcataagtgttgaaaccaaaggctttgttatagataatataaccgtcttttgctacgagaacctgacagccgggagttgcttttacttttatggcggcttggcatatactgtcaattttaagtagggtctgtgaattcatgccgcaactttctggctggtaatatcctaaccgcagtttcggggtggataacccggtaccggcgggataatagtggttgatacttacgggtaatttcccgttcacgttgattcccccgaagatggcttgggcggcaaactgttgtgcgggagtgtcatgtgaataactcacgataatggcatccatgggaaggtagctgtacaggtctattccgtaaggtgtggccggatggcagaacacgatgtgttttcctttcagttgcttgataatattgacaagttccatggttgccccgaattgccgggatgccgtgttacgggcggcactgttatacaggataacacaattgtattccgatagatttttaatcagtttctccactttttcttttgaggcgccgggagatagagaaaagtgagtacaaggagcgtatttctctagtgtactctcgaaaacgggggctttccggtcaccaaaattcaatgaggcaacacgtagcgtgtctaaatgtgtcaacgggagcaggagggcgtcatttttcacgagcgtgatcgctttggcgtatgtttcttgtaataacgctttggctgatggggaactcaatcgttcggtcagtcgggcggtgtccacgggtgtagcatacgggagtacgaattctgcttttgctttaaggactttccggcatttttcgttgatcatttcttccgagagaacgccttttcggatggctgctttgattttcctcacggaagcttccacgttttccgggaataacaaaatatcgtttcctgctgctaaagcctctacatcagcctctccgggagttcttcctttggtgacacctttcatgttcatggcgtccgtgaaacaaagaccattgaagtgtaatttctcgcgtagtagattcgtgatgatctgtttggatagagaagccgggatattggccgtatcgtaggaaggtacgtttaggtgggcaatcatgactcccggtatcccagcctcgaaaagttggcggaaggggtacaattcaaccgtgtcaatacgtgccgcggagtggcgaatcaagggtagtgccaagtgggaatcgacgtctgtgtccccgtgtcccgggaagtgtttggccacggccatcacgtgctgggattgtagacctcgcatatattgtaaggtccggttgccaacctcttctttcttttccccgaatgaccggatgcctataaccgggtttttagggttaacgtttatatcggccacgggggcaaagttcacgtggatacccattgtccggcattgctgtccgatggctgctcccagacggtaaatcaaattcgtgtcttgaatggctcccaacaaggtttggttgggaaattccatggcgggtttgatccgccaaccgaccccgttttctgcgtccataccgatcatgaggggaattttagcgctctgttggtaggtgtttgtcatcaaagcttggcttagtgggctaccttgaaagaagatgatacctccgatatgatgcttttcaatggttgctcctaggtggttctcgtacacgctgtctttgttgctataggctgcaaccatgatcagttgtccgatcttttcatccaggctcatggtatttagcgtcgaatcggcccacgaggactgagcctgaccgtggagagaggaaaggagcatacaaaatagtccgattacgggaaggagcttgtgcatggtatacaagttttagcgttagaggttggttaaataaaagtgcggcaaacatgaattgattgccgcacttttataggtggattggaaattatttcaataattcagcaatcttttgttttaattcgtcacctctcaagttcttggcgatgattttattattttcgtccaataatactgtgtgaggaattccgcttacactgtataattgtgcaggagctgattgccagcctttcaaatcagaaccgtgtttccataccaaaccgtcatcagcgatagcttttacccaagcctctttgttgttatccaaagatacaccgaagatttccaatcctttcgggtggtattctttgtagatttcaactacatgaggattttcaccgcggcaaggaccacaccatgaagcccagaaatcgattaatttcactttacccttgatgtcatacaaagagattgattctccttctggggtagtaatcgtgaagttcggagcgatttggccaatagctgtgctttctaatttagcgatttgagcagcaatagctttaccttgtgcgctagcttttgctttttcacccagtaagttatatctttctttcaactgctcgtattccatttgtcccatgctggatacgataacgaaagttgaaacataagaatccggattagctttgattaattcagtttctttagcttgagcatccgtcattaattttgcgtatgcttcttgtacagcctgcattttagcctgatctccattagctgcttgatattcttgttgcaatttcatggcctcttgttgagttgtcgtgttgatagccatgaattggtcatatattttttgaccttcgctaccagtaacagttaatcctgcctgtccagcattgactgtaatatttgcattttctaacatgaatggaatagctcctctttgaccgataaccatgatataagcaccggtaggttcacttacgtttccggtaaattcaaatgaaccgttcttcacgtcagcttttgctaaagtgtcaaggctactgccattaacagttgcgataatagccttaccgtccggcattccttctaccgttccggtaactttgtaaccactttgggcattacatgctgcaagggtcatacttgctgcaacgattgataataaaagttttctcatgtgttttagttttctaaatatgaaatat

SEQ ID NO: 398 - DNA, 4295 bp, Butyricimonas faecihominis
ctataaacagagggagagttaaaatactccctgtcttcgggaagagtcaccagctcctcctctgtttatagaggaggtggccgaaggccggaggagttcaatctaaaatctaaaatcattaaatctaaaatcactccgcttttatcctgaatatcaaacaatacgtcacgggcaacaccacgatagtcaacaaactggctaccagcaaaccacccatgatacaagctgccatcccgccaaacatagcgtcaaacaacaagggtagcattcccaatatcgtcgtacccgaggccattgccaccggaacgattcttgacttcgtggcctgcaacacggcatccagcggggccaacccgttctcctgttcgataccgatctggtccaccagtacaatcgcattcttgatattcatccctaccaatcctaacacgcccagtaaagcgaaaaagtcgaacattttccccatcatcagcaagccgaagaccaccccgataaaaatcaacggcaccatcagcaatataatggtcggtttccggtacgttctgaaaagcaacaacaacacgataaacatcaagataaacgtcaacggcatattggcagccaaagcctcgttggactccacctgactctcgtcctccccgaatattttcatccggtagccttctggcatatccatacttttcaccttgttccacacttccgagaaagccgctttcgtgttcgctccccgtttggggtcacattgcgccatcatcacccggtcccggttataccgtttgatcacgttataatgataatcgtatgcaaagctatccaccacctgcgccaaaggcaccgtgaatccctgcgtggcaaacacgggcagcgtcttcatattatccagattcttactatcaaacccatcctctttcagcaatattggcataaacaaatccttctcccggaaatccccgatggccaacccgttcgtggcaatttttaaggcgtaagccaccgactggcgggttatccctaggcgttgtccccgttcctgcgagtaggccggttcccaaacgggaacctgatttccccaactacttctaatatccgtcaccatatcacattctcgcatgatattcatcgcccgttccgtcaaagctgcaagcgtgtcgatattctccccgataaaaccgatctcgatggcggcctccaccgccggggacaacttgaacaaagaggaacgaatcaacatatccgggtaattctcccgcacgtaagtattcaaacgctcctccacgatcggagactgttcctttttctccacctcgatcaacagattcccgaaattcgctttcggcccgaaagatgtacttgccagataatatcgtaatggtgatcccccgattgttaccgacacgttcaccacctcatcctgatccagcaaataagcctcaatatccgacatcatatcctccgattcccgaatactgaacccttccggcaggaaacaatctgcccggaaataaggtttatccatactcgggaagaaattctgcggcataatccccatgatatacatggacaccaagaacaaacagaccaccgaaacaatcgtgatcaccttatacttgatcaatccccgtaacacggaaacaaacctgttgtagaacttcgtatcgtaaggatctttactagaatctccggaattctccttcagtataaaattaccgaacacggtcgtctgcgtcaacgccagaatccaactcaatcccagcgaaactgccagcacgataaacaaaggtttcaccatttctgccaccgaagaaggcgccaagtacaagggtaaaaaagaaaatatagcaatcagcgtggcccccagcaatccccattgcggaaccgtagcccccttgatcaaagcatctcgccgacgcataccctttttaatcaatatctgggcattatccgtcaccacgatggcattatccaccagcatacccattgctataataaaagctgccagcgacgtccggttcaacccgactcccataaactgcatgatcagcatcgttccaccgatcgagaaaatcaacgaggaaccgatcagtaacccggcacgggtccccatcaccagcaaaataataaagatcacgatcaccacggactccaccaagttcaacaagaagccgttatttgcctcccgtgcaatctcgttctccgggtaaagggtcacgagttcgattcccacgggcatcaactcctccaactggctcaatcgctccttcaccttatcccccgtcttcaccacgtcacgctccggatcggtcgagataccgatgccgatagcccgtttaccattcacccgcatcaaactgtttggcgggtccatgtaccccttttctatcgtggtaatatcccccagccgaacctgttgtcccgtctgggtcacgatcaattgattacgaatatcatctagcgttttgtacgtcccatcggccaatatcttcaattccaaatttcctgcccgtttctctcccgtgttaatcagagaattttgcgacttgatcgtctgtatcaaagagttcagatcaatccccgaattcgccaacttcgacatggagataaacacgttcaccacctccgtctgctccccgtacaaggccaccttctgcaccccgtccacggaaacaagctgggtcttcaatttttgtccccactcccgcaaatcgtgataagaaaaaccctctccggccgtcagcccgtagtatatcccgaacacgtcaccgaaatcatccgacacgctgatcgtcgaggctccctgtggcagcgacggttgtatgttcaacaccttacgccgtaactcgtcccacatttggggcatctcctccggcggggttgccgggctcaactcgatttgtattttagacatcccgtaataggaatccgatttaatcttgtgtacccggcgcatggattgaatttcccgctcgatcggctccgtgattaactgctcaacctcgctcggggttgctcccgggtatctcgttataatgaccgctgtcttgatcacaaaaggcgaatcctcctttttccccagtagatcgaaagataaaactcccccgactaacaatatggccaaaaagaaataaacgaccttcgtgttttccagcgaatatttagctatattcatcatatcaaactatttaagcaacttcaccttttgaccttccgttatgtaattcgcccctgccacgacaatcgtgtcctcattcgtgagtcccttctgcaccatgatcttatcattcccgaacaattgcccgatctccacggtccggctagtcaccgtctccgtcttcgggtcatacacccaaacacacgtctcgttcgtggtcgaattcttgaacaacgcgctcatcggcacgatataactatcctccaccggagtttctatcttcaaatttactttacaggaaaaaccgggatatatattatgcttatccctcgaaaaccgggaatcatcaattaccaatttcaccggaatacccgttccatcgggcgaggcatcaataaattctttcactttcgccttgaaccaaatccccttgtaggtatcaaactccacggtcaccgtcatgggcgtgcgagttaagtcaacactcgtctccggcaacgtaaaaccaaccgccaacttgttcgggttaaccaacttgataatcgactcgcccgggttcaccttctggtaattctccacaaacttcttctccacaaaaccgtcaaacggggcccgcagtttcgtgtcttccagcgtgttcgctgacgtctcgtaagccgatttaccttttatataattagcctccgcaatttcgtactcttgttgcgagatcgcctgcatggaaagcaaccttctgttccgttccaactgggatttagccgttaaataagccgccttgttcgcctcgaactgcaaacgataatccagcgggtcaaccgccgcgatcacctgtccctttttcaccttctgcccctcgtccacgttcatagcaatcaacggtccggacaatttaaacgccagattactatactcctcagcctccacgacaccggtgtacaacttgttaatagcacctaatgattccacatttaccactctcacaggacgtacaatatcctgatacgtgttatcctttttccctttgcagccactccacaaaagagccaccgcaatataaatcatccatttaaatcccataaaacaaaccttcttatttattacaaattattatcattccatcgctcggttaaatagcaatgaatatgcc

SEQ ID NO: 399 - DNA, 4288 bp, Butyricimonas faecihominis
acaatattttttatttttatttattttgggccttggagcgtgtgatgatgactattttcatgattctgggctggcaaatggacgacacgattgtacggtatgggagtacttacatacggatgcttacaattgggattcgacgatactggtgattgaacgtgcgggattggtggatttgtttgatggaaaagatcctgcttgtcctgagataacttttttcggtcctacaaatatttcgattatgcaatttatgtacaagaccgtggataacgatgataaagtcatgtatgagagaatagaagatatacccgtggagatgtgtagaaagatgcttttgtcacatgttcttcccaaaaagatgatgaaaaaagattttgactacgagaaccggggaacccttgaaggaggaacctatattcaggctctgtcgggtacggaattgcgtgtgttccgggcaaaaagttcttatatggggattgctgatattggagcggaatcattgggaattcatgcattggtaaacggctatatcgtgggaattgcttctgctgatattgaaatgaataatggcattgtacattcgttgagttatacgtaccaattttctgaactttaactatttgcgagatgaaaaatgtaactggaattataatattgttagtgttcgtgtttatttccatgatgggctgtcaagatgtgacagttggttatttaatgacttcgaatgctacttatacacctgattctatggtcgtgaaggctgtgctagatccggtggaagatgaacgtcagattaaatttgaaattccttggcagtcggcacctattgaaggtgttcaaggaacttttcctatggtttattcaataaagagtgtggcatctgataacggacacccggaggtagcatctcaatttacagtggcccgtaagggggtgattgagttaccttggaatcatacggttcctcccggacgttacgtgtttaccctagaggtatcaaacgagggatatactcgtgtattggattctatttatacggttattgtaaaataacgtgttgggtgtgctttgataggggagtgtttctttggaacacatccctttcgggtatttaacctaaggatgtccttaaattgatttttggaaggattccatgttgggaatccttccaaaaatcatgcataaattatcgtgtatagtaaataattcgggatgaatatacagcatgtaaatattgtggctcgatacgaagcgaaactattaaggcgtaatattgtttttttaggatttgtgatacttgctatgattggaatttccttgtggcaggtggttaatcagggtggagataacgtgttttggtataaggtagcttttgcttcttctttgccttttttcaatgtttactattataatttagtgcaggtgctgattgccgtgtttgtgagtatggaggtcgtgtatcgggagagaaaaagagaggcgatggaagttttcctgtgccgtccgtttcggaatagcgagtattgtatcgggcgattttgggggattttcaaaatgttcttatttgtgaacgtgtgcgtgttgtctgcatgtatgtgcttgaatgtttgggtgatagggggtccttttaatatgtgggtttatattttctatttgttcaccttgtcagtacctaccttagtttttgttttggggtgttccttggcggtgacggagatcgtgaaaaatcgttccgtgtcagttctactcttggttattttgggtggaagcgtgtatttttatttggacgagtggcaatttggtatgtttgatttctggggaaggaatttaccgaatatgttttcagacttgaccggacatccggatatacaagtctatttgctacatcgtttggggtatttcggtctaggaattgcgggaattttagtttggatggcaagcatgaatcgtttgcgggattgtttggaatatcgaagattgcaatgggggacgggaatgattgttatcgtggggagtgtggtgtgtctgctcctttttagaaatacgattcggcaacgagagttacaggcagaattgtatcggcaagtttacgtggagtatcaattgaaaccgaaagtacgggtggtgcgtcatgatattacttacgagtggaaagatggggagatggttttagatagtcgtatggtgctacagaatcggaatacagaatcgctctcggagatcgtgctgtatcttaatcctgcattgaaaatttattccatgggggaagagggaaaaaaattgtctttccacagggaacaacaactggtggtgattgaacgtcctcttttgccgggtgacagtgtcaccttgcaactggcttatagaggaaagattgacgaaaccatatgctacccggatatatcttgggaaaataaacaaagtgcggggaagtatgaacctcgttcacgtttaaaaggtttgtttaattttggagttcattatgcttttgcagacgaacgttatacgttattacttccagggtgtctttggtatcctgtgactgttccaccggtcaatgtgatctctccttatgtgcgggaagtgaatttctcggaatattcgttacaagtgaaggtcggggagggacagcaggttttgtcgcaaggtatttcgttgcgcaaatttgggaacgtggttttcagaaacgaacagaaattaccgggaataagcctttgtatcggcaattatcagaagaaagaagttcaggtgggagatattagtgtcgagttttactatttctctgatcacgaggaattttttgaaggatttacccttcttggtaaagagatgttggttaaagagttgaggagtatacaggagcgaatggaatcgggtttcgggagaaattacccatttcataagttgatgttagtggaaagtcccctttcttttgtttctttcctgcaattttggaagacaggtagtgattttgtgcagcctgaaatggtgttctttaatgaacggggtgcaacacttcccggatatgttccgctatacaggtggaaggcgatgattgaagcgagagagggacctcttgatgattcggagaaaatttatggggttgaaaggatgaggctacttgcttgtggaatgttgcttcagcagggaatgtatagtattttacccatgtattatgattacacgagttttttgtcctctgctacctatcccgctataaatatgttgttaagtgaagcctttgccttgaaaggacgtttgaccgtggggagatccttggtaagaccgagtgatatagaggtggtagaatgtttgaaaaagaaaagtttacgggaaattctttccgatgattctctgtcggataagctacgggtagagatttttaaattgcagggaaagaatctggcttccatcctgtctgcttttgtgaatcctgatgaattatatcgtttttcagaaagaatagcttctcgtttccagtttgatgaaattaccttcgaccggtttgcggaagattttcaattggagttgggacttgatttaatacccattttagatcgggtgtaccagactgttggattagcaattttggatgtgagggatattcgggtggaacaagttgttacagaggggtacccccgctatttgctctcttttaaagttcggaacatttcggatgtcgatggggtaatcacgtgtgttgccgataatcagacgattgaagaattgcgggatgtatataaaaatgcgatacctccggatttggatgcatccttaaaggtacaagattacgtgattgcggcgggagcatgtaaagaggtaaaatttatcatgtatggggattgtgggtatataagtacgaatttgtcagccaatcttcctcgtgaatattatattgaagtcgtgagggagggtatttctaagacgtgtgaccagtgcgaaggaatttttgatatagatagtaatttattccatgagccgggggtgattattgttgataatgcgagttcccagtttcaactggtagattccggtcaacctaagagattgcctttttttgcaaaagagcagaaaaaagtgtataaaatggtgttcgacaatgtggaatggacggagatcatcacttcgacaagttatggtatacccgttcagagtgctttctgtaagttggcaggggaaggcaatggtaaggcaatttggaccgtgaatgttcaaaaggccggaaaatatgaagtattcttttatcatcagtttttgtccatgacaggacctccggttagttctgtat

SEQ ID NO: 400 - DNA, 4288 bp, Butyricimonas faecihominis
cttaatatgtcggaagaagattatagtgatatatggatagatgtacacgaggaaattcaaaagccgtggttccagaaattattacatgaagattgcacatacaaaacttatccttatactacgcaagagcggttgaagaaggtaatacaagatcttggcgactgaaaattaataatattgcgagataatttctgccgctttcgagtaaccaaggcgttttgagatttccaaatcttgaagggcttctttgtaattatcgacaatcagcttggaaatagcccggttatagtaggctctagcattggaaggatcaatttcaatggaacgggagtagctttcaatggcatcactaagttggcctttctggtgaaagatgacccctcggttgaagtatacggcacttgattttaagccaagggaaattgccttgttgtaatcagcgagggctccgtccaagtctttcattccataacgaacgatgccgcggtagtggtatgcctccaataaatccggctgtaagttgatagcgtgactatagtcctgaatagcttgggttggctgaccgagattctcgtatatgattccccggttataataagctagagcatgatcagggacattggctatcacgtaattaatgtctttaagggcctcttcattttgcttgaggttcgcccggataatagcccggttataataggcggaaaagaaatccgggtccaacgagatcgcatggttgaactcttccaaggctttccggggttgctctcgggtaatgtagtccatacctcgctgattactcttcacggcttggtggtgagtacacgaggtgaatagaaaaaataacattatccaagtataatagcgcatattccttttaattacgtgattcaaagttaatgattaatcatgaaaaaatgaatatttatttatttttatttgaatataaccgttttacgagatccgttcttttcagtttcgtgaggatgccgataatttcacttttgaattcccgtttgtaccagaagaaaaatatgttctggcgttttttttcggtttctgttttggccgattgaattttgcgcagggagtagggatgaaaaccggaatagtacatatccgtggctaatgtcatgggggtgggagtaaaatcctgtacttgttccagcttgaaatccagttctttggtattgatggctaagtcggccatgtcctctaggctacatcccggatgagacgagatgaagtaagggataatctgttgttttaaatgctctttgttgttgatggcattaaagcgagctgtcagttcccggaaaagcttgaacgagggtttgcgcatcaggtgcaacaccttgtcagaactgtgttccggggcgactttaaagcggccggacacgtggtgcttgatgacggtttccaagtattcccggtttatggcgtcgatctctttgttgcccgtgcgatgcatggagaggtcgtaccggataccggaacccacgaaacagtgtttcacccgagtgtctctacgcacttgattgtaaaggttcaaaaggtgcgaatggtcggtgtttaagtttttacacacggtcgggtgtaggcaggacggacgtttgcattgttcacaaatacgatgatcttttcccttgatcatgtacatgttagcggaaggtccccccaaatcggtaatcgttcccttgaagtcgggcatatcacaaacatgctgcacctctcgcaaaatggatgcctcggaacgggaagagataaattttccctgatgggcggaaatcgtacaaaaagcacaccccccgaaacaaccacgatgcatggtaatggaatgacggatcatgttgtaagccggaatctccttaccccggtatttaggatggggcaaacgggtaaacggcagatcgtaaatggcatctatttccgttgtggacatgggcgggtagggcggattcacgattattaattcatccccgataggttgcactagtttcgcggcatgaatactattggattcttcttcgatataccgaaagttcatggcatattttcgcttgtccgataaacactcttcgtgagaggcgagcatgatggtttgccatttcttattggtggcgtatttctcgtctttatgtctgatcacggaggtttgcgggatattggttaagctttgaaaaggaatacctctttgcagcatccgacagatttcggtgagaggtttctctcccataccatatactagcatatccgcttggctttcataaagaatggacggtttaagtgaatctttccaataatcatagtgggtgaaacgtcttaaagaggcttctatccctccgatgatgacgggagtgtcgggaaaaagttcctttaatatcttggtgtaaacaatggttggcatatcgggacgtgcgccactccggttaccgggggtgtaggcatcgtccgaacggcgtcttttagctgccgtgtagtggtttaccatggaatccatgcagccgggactgattccaaaaaataaattcggtttgcccaatttcttgaaatcccgtaaatcatcctgccagttgggctgggggacgatagctacgttcagtccgagagattcgagaagtcgcccgataacggccccgccaaaggaaggatgatccacgtaggcatcccccgtgaaaagaatgacatcaatacttttccatccccgctgttcgacttctttcttggtggtcggtaaccattgttgtatattataatccatgatagagcatttgcttgaattccgcagcaaagatacggaaagtcgctgaagattttattacctttgcgggcaaattagaatatggcatgaagaaagtaaatattatcagcttgggatgctccaagaatttagtggatacggagttattgatgaaacaactggagaaggcgggatatggtgttgaagtggatgttgaaaactcgaaagcgaaaattgtcgtcatcaatacctgcgggtttatcggggatgcgaaggaagaatctataaacacgattttggagcaagtagagcggaaacaggagggagaagttgaaaagatatatgtcatgggatgtttatctcaacgctatgatcaggatttaaagaaggaaatcccggaagtggatgcttatttcggaaaattcgattggaaagggattctcgcggagttgggtaaaagctatgacgagaaactgcggaacgaacgccatttgacgacaccgaaacattacgcttatctgaaaatatccgagggatgtaatcggggatgttcttattgtgccattccaattatgacgggggaatataaatcacggccattcgaggaaatcgtggatgaagctgaacggttggccaaacagggcgtgaaggagttgttggtgttagcacaggatattacctattacgggattgataaatacggaaaaaacaggttggctgaattggtggaccggattgcagatataccgggagtcgagtggattaaattgcattatgcttacccggccgggttccccatggaacttcttaccgtgatgcgggaacggaaaaacgtatgtaagtatttggatattgctttgcaacattgtagtgatcacatgctaaaaatgatgcgaaggggggtgacgaaacaacagaccgtagatctcatcaataaaattcgggaagaagtgccggggattgccttgcgcacgacactcatggtcggacatcccggagagacagaagaggattaccgggaactggaagattttgtcaaaacgatgaaatttgaacgtttaggggtgttcccatattctcacgaggatgacacgtattgtgacaagcattatcaggatgatgtacccgaagagacgaaaaataaacgggctgaaaagttgatggcgttacaagaaggggttattgccgctatcaacgaatcatgcgtgggaaaacgttttttggttttgatagatcgggtagaaggggattattttgtcgggcgtacacaatatgattccccggaagtggatcaggaagtgttcgtgacaagtgaaaaagcgctgcaaataggggagttctatgaagtgcttattaccgaatcggggcaattcgagctttatgctaagtatgaatagccgttcctcgaaaagaaataatctattttagttgtaaaaaaataaaagatcgggaatattttttcatttttatttgtacttttactcatcagggttcgtttaaatcttgacgagtatttttttgtacgacttttactaactacaaatatat

SEQ ID NO: 401 - DNA, 4241 bp, Butyricimonas faecihominis
taggaaaagatatttttgaaaatataatatacaaggataatcggggaaataaggtgacctattcaaaagagtttcttggcaagatccgaagaggaagacatagaggagacgggaatgttgaagagtttttgttgttagggttggccaaagatgtcgggaaaaagaaaaattacacggaagagtacaccgtggatatattcggaaatattgaatacaagaatagcgagggacgtcgggtttcgataaagaaagatctgtttgatgacttcgagtacaaggataatcagggggtaagtctttctatccggaaggatatttttgatcatgtgcaggtaaatgatggcaggggaaacaaggtggatgccgggagagatatttttggtgatctccaagtgaaagataataaaggaaataaatggagcgtggaacgggatatattcggggatttgaagtttcgtcataattataaagagtgtgccaccttgaagaagaatatttttgacgagagagaatattccgataacaaagggaataaagtcaagtattcgaaggaggcgtgggataagatgataaagacatacggaaatgacgagaaggttttttcgatgttgttgaaaaagtttttcgtggagtatcgttaagaccttttgtcatgcgattgggattttggcatatactatggcgatgattgtattgtagtctgtcaataaggcaggtgtgcgtgttagaggtgtattgatttgcaatttttttttacgttcttgattttggctttatgggcatatttatgtcgatagtcgtgttttattaacaaaaagatgttgtttttggcataatatttgttaattatctccttgtttgaattggtataaagttaattaaaatttttagtgtgattttttcctatgggagtgtaacatttttaaacgaagtcccgtatttcgagtgttatttaagatcaacttagatatataacaagcaaacaatagttaacaaacagatgatgaatatgaaaaagacgtttattttgttatttgtagcgattttgccattattggctagcgcacaaaaagaagaagttaaggtgactgtggtagaagaagagtctacggctccatggcgtggttttgttaccaatggattttgggataactggtttatttcaataggtgccggtggacaagtttattttggagagtatgatagtaaggatgatttcgggcgtcggattaccccgacatttgatttttccgtgggaaaatggttgatgccgacattaggagttcgggctcaggttggtggtttcacgttaaaaggtttgacatctgatcctgctaatatttacgctaaaggtccttctcgtgtagacggatattacaaacaaaaatggcaacagtttaacgtgcatgttgatggattgctgaatctttccaattggattggtggttaccgtacggatcgtttctacgaggcagttccgtttgccggttttggtatgattcatggttgttcttctgcggataacacgaagtttatgttcgtggcaggtttgatcaataaaatgcgtttatctaacgcttttgactttaacatcgaaatcaagggtagtttggttccccagtcatttgacggtgataccggcggtagcaaaggtgaaggtattttgggcgtaacagccggatttacgtataaattcaaccaacgtaattttagaagagagaaaccgacagaaatcatttctaccggagtttcaccggaaatgttaagtgctgcagaggctaaattggcagagcaaattcgccgggcagatcgtttgcaggatgagttgaatcaagctcgtaaggctcaaccgcaagttgttaaagaggtaaaagctgctccattggctatattctttaatatcaacaaagcaaacattaccgccaaggaaatgattaacttgaaatactacgcggagattatcaagagcaatccgaatcaagtttatagagttaccggatatgcagacaaagcaacaggtactcctgcttacaatcagaagttaagcgagaaacgcgctcagaacgtggctgacgctttagtgaagaaatttggtgttaaggccagccaattgcaagtagttggtaagggtggtgttgacaatctttacgagggaggagttcaattgagccgcgtggttatcgttgaatgatatgaagactacataactactaaccatatatacatttgaggtcgggataaagggtgatacttttatcccggtcttattttattgctcttgcggttttatataacttttagcttttcgctttcagcttttcgcttaattagttgtatctttgcccgtgaataattaaaaaacagagaaatgataacaaagaataagtttgtaaccgtgagttacgagttgagaacggcagcggatgcagaacccatcgagatagctgatgagaagacccccttagagtttatttgcggtcaagggcaaacattggaatatttcgagatgaacctgttgaacttgaacacggggaattcttttgatttccatattccggctgctaacgcttacggtgaggtgaacgaggacatgattgtagagttacctaaagatatattcgcagaagttgaggcggaagagttgattcccggaaacgtgctgccaatgcaggatagtttggggcgtcacctgaacgggacaatcgttaccgtgggtgacgatacggtgaccatggatttcaatcacccgatggccggcaaagatttgtttttcaagggtaaggtgttggcagtaagagacgctacagatgaagaactggaaagcttacattctcataaatgtggcggctgccacggttgtggatctgatggcggttgcggttcagaacactcttgcggtgacggttgctgccactaattaattgaaaatggaaaattgaaaatggaaaattgggataatcaagtcttgattttccattttttatacagaccaaaagtttaatctacgttgatctttgaatattgaagtgttgttttccttcattttcaattttcaattttcaattttcaattgttatgaacacgattggtaagttatacacgttaacctctttcggagagtcacatggggaggctctggggggagtgattgatgggtgtccagcgggacttcccttgtcggtggacgagattcagtatgagctgtaccgaaggagaccgggacagtcttccgtgactacttcaaggacggaagaagaccgggtggaaattctttcgggagtattcgaaggggtgactacaggtacacctattggttttgtcgtgcggaataaggatcagcggagccgggattatgacgagataaaagatttattccgtccgtctcatgccgactacacgatgcaggcgaaatatggtattcgggattaccggggcgggggacgttcgtcagcccgggaacacgtggttcgtgtggtggggggagctgtggctcgtcaagttttgaaaagactgggcatttctgttcatggttacacgtctcaggtggggccgatcgtgttgaataaaacttattgcgagctaaatttggaggaaacggaggctaatgtggtacgttgtcctgattcgatggtagcgggggaaatggaattgtttatccgaaaaatgcaggaggaacaggatagtgtgggaggggtcgtgagttgtgttatccggggagttcccgtgggtgtaggagaacccgtgtttgatcgttttcaggcccggctgggatattacatgatgggaattaatgcggcgaaaggtttcgagtatggcgagggattccatgctgcaagtatgcgggggagcgagcataatgatgctttcgtgctgaggaacgggcaaacgaggaccttgacaaatcatgccgggggagttttgggaggaatcactagtggagaggatatttatttccgggttgcttttaagcccgtggcaacgatcgggcaggagcaacaaactgtgaatcgtttcggggaagaggtgactttcatagcccggggacgtcatgacccatgcgtggtgcctcgtgcggttcccgtggtggaggcgatggctgccatgctggtattggatatgatgctggaggccgggaaagtaccctctcgggtatgaaagaagtaaatatttttttgacaataagcttgtttaggatgatattctttattaattttgttggaaattaaatatcagtgttatgg

SEQ ID NO: 402 - DNA, 4230 bp, Butyricimonas faecihominis
gtataaagctacaattattattagaaatttgaatatttaatcttgctttttttctcgtcattaattgacagaaacactgaaaatttgacataacatcagtgacaaaaagtcctcaaaatccattggcacgtgctttgcattaactataatcgaatgcaggttcacaaagaacctgaatccaattaaatgataatgttgaatttaaagataggagactaaaattatgatgcctgtaagaagaactcaaaattggttaccaagtatctttaatgatttctttgataacgagtggatgacaagagcaaacgcaaccgcaccagcgatcaacgtaatcgaatccgaaaaagattataaagttgaagttgcagctccgggtatgacaaaagaagatttcaacgttcgcatagacgaggataacaatctagtaatctccatggagaaaaagagcgagagtaaagaggagcaaaaagaacatcgctacttacgccgggagttctcatactcgaaattccaacaaaccatgatcttaccggatgacgtggataaagagaaaatcgctgccggggttgaacacggagttctaaccatcgacttgccgaaactatctcaggaagagattaaaaaagcagagagaaccattgaaattaaataaagacaggtaaccaatgaaagaagcgatcgaacaattcgatcgcttcttttttattccctgtgttctaataccttaaaataatcttaccgttgtaacgggaaagtcaatacttgctctttgtctttcttcacgtctgatttattaatctcgatgttttcaaccaaaattgaagacgggtatattaaagaagatagtaattgaccgttcaaaatataattgcttacattttccttgctggaaatattcaacatacgtttcaggtttatcaatgtcaagccactcacatcaccgaaacggacttgagtttccttaccatccaaatctacccgatagatacgagaagctttacccgctaaactccgcacgatataagcatacttcaaaccttcttctttagcagctttaatcagcgcgctcttcatcttttccggtttcgttcctttctccacttcaatatgaatggtacccggagccgtggaaaacattccattgctactggacaacaagaaacgagaactacccgttgattggggagcgtacaaagtcggggtacacccattcaacatacttttgaaaataccattttcaaccaaagtcatctctttggcaggcacgataccttcagcatcaatattataagctcctaacaaagaaactccattatacttatccaaagagctgtaatttttgatagaaactcgattgtctacaatcttcattcccaaacgagcatctaacgttttcatcggttgagcccggtcggtatcgggtttacgataagcgaagagagctcctcgtttcaagaagttacttataaaaacagatgaacaagcaccatcctcaagcaacaccggacctgcataatattctgtaattgctggcgcattcttcaacttgatcaagttatcggcaaaagccttaacccctttctttaattcatccaaagaaggcaaatcatccggacgagcaacaagcacggaatatgcatcatcaatccgaacgccatcttctgtcatcacgtaagcagaggcaaccaagcttgcataacgtaacggttctttcagcacaaccccatccgtggtagacttgtacacttccatttcctgtccggtaatagccacggatgaatcataaatatccttatagtccttgaaaatagcagataattcttctacaatattctctaattttgctctatcaatcgtgtaagcatttttcggttcctcgatccgggtaacggcatccaccttctgttgatccttcacggcagtttcttcggcagtcttcgggttcgccttcaaataagcgtccttcatcgctcctgcctgcaatgaccatttatacatggcatctgatcctaaccagaaatttctccggattacatcataatcagcctgttccggcattccggcctgaacagaagcacatacataattaatatcattattatgatcgtaatctcccaaaaacatctgcaccccaccaacggcactccaaggagactcgtaaaaattagtaacaccacctaacgcacccacaacctcaaactgatgtgtacgtcccaaagtataagacaagtaatatggtttctgcatacccggcaacatcaattgctccttactacgttgcatctcatcctgcatagccttaaagatcacctgatcctgctcattctgtgcggataatgatcctgccaacaggaaaaacaatataatcgataatatatatttcatttttattctaaatttaaaatttacgaccgaagaactccaagcctcaatgatttcgatctattcattttcagttttcaattctccatttcatttgttctgcggagccggtaagatcgggggtaaatctcttgacttctgtctacgttgagtctcgatcttatttaccagaatcattggggaactagccgttacaggcacccaaccggattccgcaccacactctcccgtgaacacgctgggagcatcacctccacatacaatattagagaacatggataacggggttccaatcaaatccaccccacgaaccaactggtccggacgtccgtctacatagattcggtacacttccaagggagtcacgttaaatgaattcaaactaccaccttccccggtcaacgtgaaaccactggttacttctttaaaatagtacccgtattcttttccttgttttttagcctcttcaatcaacatggaacgcaattcagcctccgtgtgaggtgctgttgtctccaccaccaaattagattgacgggatacaggatcaccacctccggcagtacgtccatgcccattactatgcgggaatccatccagcggcacgcggctcatcaagaactctctcaaaataccgtctttcacgacatcaacccggcgagctttcactccctgatcatcatacaaataaaaaccattcaactcttccccggcataactacgcaaagtcggatcgcaatacacttgaaagtctgcaggcaaaaccaactcgcctactttcttcttaaaagtttcaccaccacctttcaaacggtgaccttcaatacgatgaccgaaaatctcgtggaagaacaccccactagccggaccggacaaaatagcgggtcccgtgtaaggatcaacaaccggagcatcacgcaacacggtcaatctttttaccatatccttagcgtcagcaatcatccggtcattagacggaaggtccttcggatcgtatgcaaagtatgacatattcaacggtaactccataccgtcttctgccttcatggaagcactaatcatgattcgtgcatatgttctattctgcacaacttcagttccttccgtatttacaaaataattccgaagcacccggaacgttaaactaacatcacccgactgtaataacggatatgctttaaacaccgcagaaacttcattcaaacgtttttcccaagcagcttggtcaaccgtcaacttctcagcaggaagaggagcctcgtaatatttctccaccggagccgcagaaaatgaaggagctttatcctcatcagcaacactcacctgactttgagttttcgctctctgataagcctccactgcaaaatcataacgtttcatcacttcagcccagattgcctgacgagttgcatcagcacctttttcatcatccaatcccaaataagccacccgtacattaccacgttggtctgccggggcccccatcgcgttatatttaaaattatccaaaatagtatcccccacccgaatctgcggaaccattgaacgagaatgttgttccacggacatcatcgtggccccgaaagaactcgaaatattcaccgtccgatcatccatcaccctaaagttcatgtgatagggaggattctcctgtttctgcagctcttgcatatcagctgccaactcttgtttcaatagttgcaacaacttatcctgttcctgcgcgtacaacgtatgcatcgataacagcgagaagatacaactaacaataatcaatcctaattttttcatctctaattgttttaatcatttaattttttgatctctgaagatcacgcactatttcca

SEQ ID NO: 403 - DNA, 4206 bp, Butyricimonas faecihominis
ggtgatagtatttactatttttataataagagttctcttacagtcaagtcggcacaacaacgtgataccttttattttgaagtacgggcggccgggcttgccaaaagtgtggatcgccaaatcaaaatagttccttggtcttgtgaggtaagtggctttacggaggcagtggaaggggtaaattatgttccttttgatgacccggaaatggtgaaaaatcttgtccttccggctgattctgtgcaagtaaaaataccggttattgttacttatgatccatctattgctgggacggcaaaatcgtttatcgtagggttgaaacttattgattcgggggatcttagagttatggggacgaacttcaacattacagttgtcgataaagcggcacgtactcatgcttgtgtgcgatttaatcaaagtagcttgtgagtttaactgattaattcctcatggtgaaaaatacttagtcatgaggaattttttatttgaaagattcaaattgttcgtatgaaaaagtttgtattgttatttacttgtatgcttatagccatctccgtgtttgcccagacaaattttcaagagttgacattagcgaaagcgttgggaaaagcgaaaatggagaataagtatgtttttgtggattgttatacttcatggtgtggaccgtgtaagatgatgacggcaaatgtgttacctttgaaagaagtgggggaatacatgaacgaaacgtttgtgtgtgtgaagtttgatatggaaaaaggagagggacgggatattcagcaaaaatataaggtgtcctcctatccgacatttttggttttgaatgtagatggaagtttattacatgcagttgtaggagcttctgccacgggagaagagtttgtggcaagggtaaaagaggcatttgatgataattctgcggggaaactggcagttgaatacgaaaaaggaaatcgggatagggatttcttgatgacctatatcaaggcattggtgaaagcttgtgatgtagagaaagcgcataaaatttcagaagatgtattggcatcgttgagtgatgatgagaaatgcacggagccatattggtttatttatgaaaatctggatttatctcccattggttcaaataatatgatgtatttattacaacatgtggatcaattccggcagggagttggtgtggagaaagtagattctgtcgtgggaaatttgtttgctatccaactggaaaatattttgcgaggacgcaatagaacggtaactttggaagatgttgaggttgcaggaaaaatgttagagtcttatcatttggaaggacatgattatttgaatgattatatagctttgattaaagcggtgaaaacagaaaatacggatgatgtcataaaattatacaaaaaggtatttcccaagatggatgccggaaaaattgcttacttgtatttcaccccgataacaacgttgaaggggaaatggagcgtgaaacaaaagaaagcgttaagtgcattgacaaaaaagattgcaggaaacgtgacatcaattcccattcaatcctctttgatgggttttgcaaatatcactcttccaaagctataatgtaaaatggtgcgtgcttcgattttgtattattataaatgaaattaccatgagatttatattatctttatttttattgttcttgatcggtcaaccgatagtttgggggcaaaatagtatggcaaggacgtctatttttgaagaggggggtgaggtgaagtcttttaaggataatttcaaaaatttgaaagcaaattgggaacgaataattaatcatgccgattttgaaattatttcttgtgattatgcttatacgttcaaaaataaaaaacaaataaccaagtatgctaaagaacattctcggttggagactcctttttttgcaatgaatattcaagcttccgtgaaagatggaaaatggagcgagaaaatttttgtacgattgacctcttttgcgcaaatggtggaggatgctacggaaaataaagaagggatacgagatgatcatctatatcatttgggacttcgtaaagcggaaatcgagaataaagtaaaaattggagatcgggtatatgccattcgttataaagtgaatggtaaggagcaggtggattacgtggtttgttctgcggagaattacaaagtaatttgtagctatttattcaatagtgtttcctttaggaaagggtaagaaatgaaaaggttaatatcactattttgttgtctatgcttgtttataccgacatttgcacagacaacttttcaagaattaactcttaaagatgcattagaaaaggcaaagacagagaataagtatgtttttgtagattgttatacttcgtggtgtggatcatgtaaactgatgacagaaaatgtattcccctcgaaaactgttgggaattacatgaataataagtttgtttgtgtgaaatttgatatggaaaaggaggaaggaattgatattcagcagaaatatcaaattatgtcctacccaacttttttggtgttgaagactgacggaacactgttatctcggattgtgggggcgattcttgatgaggataaatttattaagagagtggattcggtttttatggaaaattctgttattcagttggaaggggagtacatggcagggaatcgtaagatggatttcctgttgagatacatcaaagctttactggcttccgaaaacacgacaaaagcaaaaagtatcgcattggatgtaatcacctctttggaagataagcagaagtgtacggcaccctattggtttatttatgaagattatcgtttgtctcctgtcggatcggggaatttagcttatttgctaaaacatgtagaacaatttcgtcaaggtatcggggtagagagggtagataaaaaattaggaatcttgttcgctctccaattggaaagtattctccggggagccaacaaaaatattactttacaggaggttggtaaattaaaggtgacattagatacgtttaagctgacaggtcaggactacttgtatgggtatattgatttgattaatgggataatgacggggaatacaggggtgtcgttggaagcttacaaacgggttttcccgtttgttgcggatgaaaaaattgcaactttttatttcatgccgatcatgtattttaaagataaatggagtgttgagcagaaaaaagaactggctgtcttgacagatcaattgatcaagaaggtgcaattaccagaattgaaatcttctttgtatgagattaaaacaaatatcttgacgaagtaatcaaatttataagtgatgatgaaatggttgtttatttttttcatggtatgcccgttaatagggtggagccagatcagggtggaacctgtgctagtgcatgatacggtcgaattgaaagtgggtgatcgggttcccggattcatatttcgggacacggcaaagcaagaaatatctttgaaacaatttaaaggaaaatatgtcgtgatagatgtgtgggcatcgtggtgttacccttgtaaaaaggaatatcctactttgagaagattatcaaaagaatacaaaaatgttgttttcgttagtctttcctgtgatacggaggagcaacgttggcgaaatgaattgtggtggggaaaaatggatggataccagtggtggattgcaggtgacgaatcttctatgatcgcttttcgagtaaaagcaattcctcgtcttatattattggaccgaaaagggagagtgatggatttgaaattgccccaaccttcaagccctgagtttgaaaagatattgaaagaattagagaaagacaataagaaataaaaatttgttgtatgcttgtaatcaagaagataatgatcgttcttgcttgtatcttaatgtccggagttcgtgacaagagcgaggatacgacttttaaatttttatttccggcaaatgagacgagaaaagttgatctcgaatttcaggaccaacggacaacgttaacatttgtaccttgggattctttgcgggtagcctcggtttcacttgctttatctggtggaaagtacgcttgtttatgggtgggagaaatgccttatgttatttggttggaagcgggaaaaccttggactgctaggtttgaggggaatcgatggttttttgaaggggtgggtgctaatgtgaat

SEQ ID NO: 404 - DNA, 4198 bp, Butyricimonas faecihominis
aaattataatgaacgtattagttttaaactgcggtagctcctctattaaatatcaattgcttgacatggcaggagaaccgacgttactcgctaaaggattggtggaaaagatcggtttacccgtgggaagtttcactcacaaaccggaaggaaaagataaatacgtggtagaagaacctatcgcggaccatacagccgggatcgatctgatcttgaaagctctggttgacccgaaacatggggtaatcaaggccttgacggacattaatgccgtgggacaccgcgtagctcatggaggtgaattctttgctaagagcgcccgtgttgacgaggatgccaagaaaaagatcgccgcttgctgcgagttagccccacttcataaccccgcaaacttgaaaggaatcgagaccatggagaaactgttaccgggcgtaccacaagtagcagtattcgacacgtcattccaccaaactcttccgaaagaagcatatatctacgggctcccatacaaatactacgaggattatcgtatccgtcgttacggattccacggaacctctcacaagttcgtggctgaaaaagcatgtaaaatactgggatggaatattgaggagaaaaaaatcatcacttgccacttgggtaatggttcatccataaccgccatcaacaaaggtaaatccgttgacacctccatgggtttcactcccaatgctggtgtgatcatgggaacccgtacgggagaccttgacttgggagcattattgtatatctgcgagaaagaaggtttaaacgcagcacaggcaaacgacctagtaaataagaaatcaggattgcaaggagtatctgaagtttcttccgattgtcgtgacttacaggctgcagctgaatccggaaacgacaaggctcgcctcgcccttgatattcttgcttacgacgtgaaaaaatacgtgggtagctatgctgccgccctaaacggagcggatttgatcgtcttcaccgggggtatcggggaaaatgacagtgaagtacgtgaacaagtatgtaccaacatggaatacatgggtattcactttgatgttgccgccaataaaggcgttcgcggacaagacaaagtactgtctaccaccgattccaaagtaatcgtgatgagcatcaccacggacgaagaattggttatcgcgacggacaccatgaatctagtgaaataagctattatttctatataaaaaaagaacgatctgcatcacagatcgttcttttttatatacgttcagtcatcatgcttgaaaagacaaccgattgattttcttgccagttagaacttggatttcccgaatcttagactgttcctcttccgaacaaaacgtcaccgctgtaccgaaatgtcccgcacgcccggtgcgcccgatacgatgtacgtatgtttcagccacatcaggcagatcataatttatgacaatctccaactcctgaatatcaattcctcgagctgcaatgtcagtggctaccatcacccggatagctcctgccttaaagttcgacagagctcgctggcgttgtccttgtgatttatccccgtgaatcgcctcactcttgatgccggacttcttcaacaagcgggatatattatctgccccatgcttggtacgtgaaaaaacaagcaccgactttttctcttgtttcaacaaggaaacaagaagtttcttcttttccggtttctccacgaaatagacacattgttccaccgtgtcaacggcagaagaaaccggggttacctccaccctcgtcgggtttgaaagaatacttctcgacaaattcactatatccttaggcatcgttgccgagaaaaacagcgtctgccgctttgtcggcagcatgggtaacaaacgtcgtatatccgcaataaatcccatatccagcatcctgtcagcctcatccagaacaaaatgcgtaattgatgaaagattcacgtatccctgccggatcaaatcgagcaaacgtcccggtgtggcaacaagaatatctactcctgcctgcaacagatccgtctgcggtccttgtttcactccgccgaatataattgcgtgcctaatccccgtgtacttcccgtaatccgtgatattctctccgatctggatagccaattcacgggttggcgttaagattaaagccttaattgcccgtcttttcacgagacgtcctttattgcctcgtgtttccgaacttttttcctccgaacgatcagccagtaaatgttgcaggatcggtatagcgaacgtcgctgtcttaccggttccggtctgggcaattcccagcatatcgccaccaccaagagccacaggtatacccttctcttgtatcggggtgggcttttcatatcctttttcacagatagcctttaaaataggctctgcaatttctaattctctaaatgtcataataaataattgttacgtttaaaattgcctccagccattttcggttcgtacatataaacctactcgggcaaagaaactgtctgaacaaagaaagcttacaaaggtcaattcaacgatggaaagagccgaacggaatatgtccggaaaatacaaagaagataaagatcaaaatgaactcacaatgtttcacggcacaaagatagttaatataattcagtttacaccatatttcttggaataattgcaaaaacccttatctcaatagcttatttctcagaaaaaagaacgtttacttcctttcatctgtcgaattcgttatatttgccaatcaatcactaaaaacgtaaaagatgggcgtgtttcgtaaatttccccgcaccttttgggtggctaatactattgaattatttgaacgctgggcatggtatggtttcttcatgctttttgccaattaccttacgggatcatccgacatgggtggtctggaattcacgcaaagtcaaaaaggaatcctgatgggtgtgggaacgggaatactctacttcctgcccgtcttgaccggggccatagctgatcgctacggttataaaaaagtactggccctcgctttcgtgatctacacgtccgccttcgtcctcctacccatgttctccacgttcacgggagtattcctcatgtacctttacttggctctgggtgccgccctgttcaaaccgatcatctcggccacaattgccaagaccacaacggatgaaacagcctccatcgggttcggcatctactacatgatggttaacataggcgccttcttcggaccgatggtcacccttttgttcaaaggatcgtccaacctcgtgttctatgtatcggctggtattatcgcgctgaacttcgtgctacttcttttctacaaggaaccccaccggggagtcgtacaacagacttctctcactcgcaccttcggggatatattccggaatatgttcagtattgtgaaagacttgaaattcgtggtattcctgctcatcgtggccggattctggaccatgtacaaccaactcttcttcaccctacccgtctttatctcgcaatggatagacacgagcgtgttgtaccatttctttgaaaagtatatccctttcatcagcaccaactacagtccggctccgggagttatggatgctgaattcgtgacgaacttcgatgccctctacattattattttccagattatcgtgtcaagtgtcgtgatgcgcatgaaaccccttaaatccatgatttcgggattccttgtctgctccatcggaatggccctcaccctattctcgcaaaacgtgctgttcacgcttgtggcgatactgatcttctcgctgggagaaatggccggatctccgaaaatcacggaatatatcggccgaattgccccacacgacaaaaaggctctctacatgggctactcctttatccccgtcttcattggtaacgtttttgccggaattatctccggtgtagtctaccaaaacatggcggataaagtgatgatcactcgtcaatttgttgcaaaaaaagacctccagctaccggacggtttgtcaaataacgcctatttcgatcatgtagcccaacaagtcaacctcacccctcacgagttaaccaacctactatggaacgagtattccccctccgacatatggatggtaatactggctatcgggctaggcactaccttgttgctctacatttacgaccgggtgataaat

SEQ ID NO: 405 - DNA, 4194 bp, Butyricimonas faecihominis
catcaaaatccatccttgtaaataataaatgcaataaacgatcctttatttatattcaaagacaaagatattacatttaacgaataatatgccacttcctctcaaaagaattccaatctttccttaaagcattttaatcaagccacacccacttacacttccacgtaacaagaaaaactctcgtactaacaaattattattataagtcagtacgagagccattaaaaatcatcaatcaaaattcctactttagcaatctctccaatttctcaatcatcttcgcaaaagcctccttcgtataaccgacctcaatctccacgatctttcccttcttatcaatgataaaatttcgaggaatggttgccgtggcaaacttcgaataaatcttacgttccggatcaagtcccatagggaacgtgtatccatttctttctcgaaacttcttcacctgctccttactctcctcgcgagaaatagccaagaacacgaaatctttccctttaaagcgatcaataatctccttctgcacccgtttcaactcctcttgacaaggaggacaccacgtagcccagaaattaattaatactatcttcccctttaaatccttaatattgatcttttgtccatcaaacatctccacgacaaattcgggaacatcatccccgacttttaccagcgtcaccttttcctgagcgttaactcttgctaaagttcccagtaccaacaaggaaaccgtaaaaataaatacccttttcatgaccttttctttatttggttctttacaaagatactgaatatctctggaaaagacgaataaaaagggacaaatgtcttcgtaatgcctgtcaataaggcgtttgcgaagacaaatgaggacaggcgaaaaatcgaggtaacgtaaaggaaagcggatttatgaagaagaacggtctccaaatcattacccgccgaatggtgatttttaacacaccgtgttgtatttggcagcttgtggcacaggttggcatatcaaggtctaactcgttgagtaataactttgcaaacaaaaaacgagtatggcaagaagcacattcaaggttctgttctacgtgaacggcagcaaggagaaaaacggtattgtccccatcatgggacgagtgacaatcaacgggactgtggcgcagttcagttgtaagcagaacatcccgaaaacgctttgggacgtgaaaggaaacaaggcgaaaggcaagagccgcgaggcacgagacatcaaccttgcccttgacaacatcaaggcgcaaatcatcaaacattaccagcgcatttcagaccgcgaggcatttgttacggctgagatggtgcgcaacgcctatcagggaatcggcagcgagtatgagacgctgctaaaagcattcgaccgtgagaacgaagtgttcaagaaacgggtaggcaaagacagggtaatggctacctatcgggcacgtgtacgggcaagaaaccatgtagccgcctttatcaagtcgttttacagacgcagcgatatgtccatgttggaacttactcccgatttcatcaaggagttcgccgcatacctctcgactgaagccggattgcggaacggttcgatatgggcaaactgtatgtggctgaaaggcgtggtcatgaaagcgcattataacgggttgataccgcgcaatcctttcatccagtttcatatcagccccaatgtgaaagaacgggaatatctgacggaggatgaactgaaagcggtcatgacacatgagtttgcagacagcaagctcgcatacatccgtgacattttcatctttgccagtttcaccgccttgtcattcgtggacattcaggaactgacgaatgacaacatcgtggaggtgaacggcgagaagtggatattgtccaaacgccacaagacaaaagtcgccttccaagtgaagctgctggatatacccttgcagatagtcgaacgctaccgaccgatgcagaaagacaatcgtatattccccggcttgaactattggtctatctgcaaaccgttgaaacggatgataagggaatgtggcataaccaagtcaatatcatttcattgcagtcgtcatggcttcgcaacattagctttgagcaaggggatgcccattgaaagcgtaagccgtgtgttgggacatacgaatatagtcacgacccaactctacgcaaagataaccacgcagaagctcgacaacgacctgaccatgttcggcgacaaactgagtaagacgtttaacggaataacgatgtcatgagtatgagaagaaacagcataacagtgaatgaatccggcaatatcatcatgccggagaatgtctcaaacatttggatgagcgagccggaattggtggaactgttcggagtaattgctccgacacttcgttctgccatcagaaacatctataacagtggagcattaaaagaatacgaggtacagaagtatgttcggcaggagaacgggtatcatgccgatgtgttcagctttccgatgatagtcgcacttgctttccgcattgacagcttcggtgcggaacaggtgcgcaatgccatatttaaaaggctgtacttgcgaaaagagaaaacaaatatcttcttttcgctgggtataaatggttgggatatgtctaattatcaggcataagttctaatgatatgacgacatgaagtagtgagacctatgcgtattcccattgccaacaatgtatttatacgagtatgtgaataggtgtattgccattcatacgtacgattacgacaaacccgaagaaaaatccattagaatggcatttcttcgggcttttgttgtatgtcataaagccaaatccaagaaaatcttacgtgaggtatgcgtgagttgttaatccgttctgcgctaattgccgagttttgcactgattaaacaaaaaaatgaagtgctaatgaaacaaggtaactttgaaaatgaggagtttatccgtgtgggtactaccctctacaagttagtgaaccagccccgtctgaacggaggctatgtgaagaagcgcatcgtgtggaacaacgaaacactgcggcaggactacggcaaggactatctcgccaccgtgccgaagtacgacggcttctgcaccgtccccgaccatgtggactaccgtcccgtggtggacaagttcctgaacctctacgagccgataggacaccgtccgcaacaaggcgagtttccctgtatccggtcattggtgcgccatatcttcggtgaacagtatgaattgggcatggactatcttcaattgctctacctgcaacccgtgcagaaactgcctatcctgctgttggtatcagaagaacgcaacacgggcaagagtacattcctgaacttcctgaaagctgtgtttcaaaacaatgtcactttcaataccaacgaggacttccgcagccagttcaattccgactgggcaggaaaactgctcatcgtggtggacgaggtattgctcaaccgcagggaggacagcgagcggttgaagaacctcagcaccacactttcctacaaggtggaagccaaaggcaaagaccgtgacgagatagcgttctttgccaagttcgtgctatgctccaacaacgagtatctgcctgttatcattgatgcaggtgaaacacgctattgggtgcgcaagatagaccgtctgcaatccgatgacacagacttcctgcaaaagctgaaagctgagatacctgcctttctgtattacctgcaatacagacaactttccaccgaaaaggaaagccgtatgtggtttgcgccctctttgctgcataccgaagccttgcagaagattatccgcagcaaccgcaaccgattggagatagagatgtgcgaacttatccttgacattatggaaagtgtcggcacggacacattctcgttctgccacaacgacattcttcttttgctggtacattcgcaggtaaaggtggagaagcaccaagtcagaaaggtattgcaggaatgttggaaacttactcctgcctctaacgggcttacatataccacttaccaattcaattacaatcgggagtgccgatatgagccgataaaaagagtcggtcgtttctacaccgtcacaagggaacaacttgaatccctgtaatactattctttttttgttgaattgatgaataatgatataaccatac

SEQ ID NO: 406 - DNA, 4188 bp, Butyricimonas faecihominis
attatcaactataaactatacggtaagaaagacgaaaagttatagacgtctattttttatgcgtggcaattgctaacaaaactcctaggacaacccccagcagggctgcaaacaaaacccgcatatcacccggcaacaagaaggtgatcgtgtgagccgggaaccagaaaaaaggaatcgtcttcttgaaaacgaaattccactgtacccgccaattcaaatttgccatgatctcccccatcttgatcggggtaaagaaaccggataacgtcccaccatgactcagtatatgcgtatccgtgatcttatgcaacgtcataaaaacaggagcgaaaatcgtgttctgtgccacggaaatacagaaggccacgaacaccttatcccacgataaactctcccccatcaccgtaacagcattttccatacccatcgtcttcaaaaagaccggaaccccgcttgagaaaatcgtcattgccatactgatacccattcccagcacaccccacacgatagcacggggccagatcccgaaacctttccgattatacaccccggcactgatcctcaacccgatacattcccctagtgttgacaagattgcgaacttcaaaaagctcataatcataccatgctcggcattaaatgttttataaaaagaatacacggcatcagacacgaagaaaggcaacaggcatacaataacacacccgataacaataaaatcactttttttcatcacacatactttacccgttccccggaaaaccacgcccttccggggcatcttaaacattatttttctgtactctcgcttgacgcatccgtgttcccgtcctccggaccttggttcaaccgggcgtccttattcacttcctccttgggagaggaatagaagaaatcaaatccttttttccaaccgctactgatacgaccaaaacttaggagtattgccagcagcaatactcctattataatgatcatttttctctcttccttgctataatttttccaagctcgcatgagaaattcctatttctcgatacggatacgagcatctacagccaccacgttatctttatttcccaacaacgggttcaagtccatctcgaagatttccggggcaaccttcaccaaagcagagattctcatcacggcctcggcaaacttatcctcgttcacgggttcctgtccgcgaacaccttgtataatcttgtaagatttcaactctttaatcatgccatgagcctcgtctttagacatcggggccaatccggccttcacgtctttcaacacctcgataaagatacctcccaacccgcaaagtaccatgtgaccgaacttatcatctcgtttagcaccgataaacacttgcgttccgctcaactgttgagccagcatgatcgcgtacgtatccttgatctgcatcatccgcttgaactcacgacgaacagtctcctcgtcgctcacgttcaacacgactccaccaacatccgatttgtggatcggtccaacaactttcatcaccagcgggaacccgatctcttttgccatcttaacaatctcctcctcgttatcagaaactccctctttagctctcgctaccccggcagcatccaacaaagtatgaatctcgtccggagacaaataaccgttttgcgcgttattcaccacctcacggatcttcttcacgtccatatcgggcatttcaaaatgttctggttgcggggctggagtcttgtaaatcttacacaaggcatttccaaacaacacctcatccgggaaataaacacgacctttagacacgaactccgcgatctcgtccttcacgatcttggaagaagggaatatcgggaaaatcggtttcttgctcgtcttcatcttctcgtcaagtaccctgtacacgtcgaacacggggaacaaaccggggctaccgaaaataaccgccatcccgtcaatattgtcaaaatcctgatcacaagcatccaaaatatatcctaattgttcagccgtacccgttgccaagaagtcgatcgggttacccacggacgacccggcaaacaatttcgtcaataactcctgcgctttctcgccttcaatatgcggaacatccattccaccgttagaaagagcatccgtcaacataacggcaggtccaccggcatgagtcacgacagccatgttacgacctttcatctccgggtgcatgaaaattcctgcaaccgtcatcaactcgtcacgcccgttacaacgcacgataccagccttgcggaacaaagcctccacggcaacatccgaactggctaaagctcccgtgtgagaagaagcggcacgacttccggcagcagaacctcctgacttaacggcagcgatccggcatcccttgcgaatcaaagaagacgcgtgcttcaacagcttctccggcttttcgatgctctccacgtataataattttacacgagaactcgtcttcggatcaaacgactcgtccatgtattccaaaatctcctctacacctaattgagctgaattacccacggaatacatgctattgaatttaattcctttttgcatcccggagtccattataaacaatgccgttgcaccagaaccggaaatcaaatccaccccttgcgggttcagttccgggatcggactcgtgaacaccccactgtaatggtttgtcaagacaccgatacagttcggtccgatcaatgatccacctaccgaattaatcgtctccacaatctggcgctccaacttggctccctcctcgttctcttcgtggaacccggcagaaaggataataaatgctttcgtgttcttctgtttagcaagcacttccacggttgacgggcagaatttagcggcaatcgctaaaatagcgcaatccacctccggaagatccttcacgtcacgatacgctttaattccctgcacttcatccatcttcgggttcaccacgtaaagcgaacctttgaagttcccgtcttgcaaattccgcaacacggtacccccgggtttatgaatgtcgtcagaaccacccacaaccacaatgctctttggctcaattaattgttttgctatcatatatttcgatttatttttaacttcctctttaatttcaaatggatgatcgctgttacaatcatccatttgaagttttttattcctagatattattgaagaatgtcagaaactcctgtactttctgtaccatcttcttcgagcccgtgtacaacggcacccgttgatggagagcctccggctttatctccaagattcgttgctccccgtccgtggccaaccctccggattgttcggcgataaacgccatcgggttacactcgtacaacaatctcaactttcctgtcgggtgagaacttgtctgcggatataagaacaccccacctttcaacatattccggtggaaatcggctaccaaagacccgatataacgggacgtgtacggccggttcgttgcctcatctttctcctgacaatacttgataaattttttcacacccacggggaaattcacgtaattaccctcgttgattgaatatatctttccgctttccggtgtttgcatattcgggtgagacaaacagaactccccgatagaagtatccagcgtgaaaccattcaccccgttaccggaagtatacaccaacatggttgatgacccgtaaatcacataaccggcagccacctgttccgttccgggctggaagaaatcgtccatcacgagcggttccccgataggagaaatacgtttataaatagagaagatcgtacccacggaaacattcacgtcaatatttgacgatccatccagcgggtccatacaaatgatgtacttcccgtccttacttaatccttcctcgaaaaccacgatgtcctgattttcttcagtagccaccccacaacactcgccactcgccctcaactcatccataaaagttttgtcggcatagacatccaacttctgttggtcctctccttgcacattgattgaacccacctttccaagtatatctaccaaaccagccttattaacctcccggtgaacctttttggcagcgatacctatgtggtgcaaaagtcgtgaaaattctccggtagccccgggaatctcggcttgccgttcaataataaattgatttaaagttgtaactttatgcattatca

SEQ ID NO: 407 - DNA, 4182 bp, Butyricimonas faecihominis
gctttcatgcattgttgctgtgtagagtgaagtgcgtggaacacatggccgtaaatcaggacccgtgacagggttagtgcgcgaagcgcgtccgggcggttcgtgtgtccggggattacagagacaaagaaaatcatcgttcgctagaaaatagggaaagaataaaaataatggttgcgtgtaacaagttaaactggtatgctgcttatacccgtgtaaatcaggaattattgatcaaaagaaagctggatgaactggggatcgagaattttttgccccaggaggaacaggtacgagaaacacccgttggacgtaaaaagatccgggtgcttttgattcatgggttaatatttatccggacggataaggcaacaagtttttccttgataaatgatcattcgttgaatattgtttatttgaaagatatagagggacgccattcgctggtagttccggataaacaaatgcaggatttcatgtttttgttggatttctcaactggtagcgtggaggttttgaacaaaggaatcaaacggggtgatcgggtaagagttattaaaggtcccttgcaaggattggaaggagagttggtacgtttgaaaaatcataaacgtgtaattattcgtttggatggggtggcctctattgctacttcttatattccaagttcgtttcttgaaagaatagagtgatacaaaataatggaaaaaggtttatttcacgaattgtataaacggtcgtgtgagttagaaatggggcgttgtccctccccggcgttgtcaggattcttgcatggttacttgtccgtgtactcgatggttcgcgtctatccttggttggaagaaagttttggggagacgtatgaaattcatgaacgagtgcgtgagatcgcccggtttatagagcctctggctggaaacaaaaatctccctgcagatgttcgggccggttacgtggtggatttgatggatgcttaccagttatattcagacttgaatttcttaaatacggcgttggatgcggcttatgacatacttaccccgtggggaagtgacaaaattgttttaccgtgtcgtaccccgaatatttgccgattgttatgtaattgttactatttcacgggtgaaatggaggacggggttttggccggtagtttgatttccgaggcgcttggctctattcgtgatttgggccgtcagggatcgatggtatggtgggatgcattctgtttttatgaagatgttgttggggcaatggagttgccggaacctgaacgggtacgattggccgaagagcgagttcggttggccgtcagtgtaaagcaggaggaggaggaaatgatagaacgttttgtcctgtctacccgtgacgatttggagttattcggccgggtgttttgtatcttggccaggcgggagtttgccaccaatgacaaattgtatggtaggaaggaataatttagacgtgattcacaatataaatctcagattccgggagatgcaacccccggttatagcgtctccctcaacggtacttctaagccggatcagctattaataccggaggggacgctcctttttgaagtttggtataaatgagatactccattcattccatttgtgatcgtttgtgcgagagaaagaagtacgttaattcttggacggttcttttcgtggacattttgttgtccgtgggaagttcattcgtggctcttctttttgtagacaattttattgtcgacttgtcaaagaatgcttacttgttcgtcattgtaggatcgttcttgatcagtcttcttgtgtttatggcgttgggggtgaacaaaaatataattcgccatgccaccataaaaagtatcgggaagatgggcgttgcgatcttttttaaggaggtgcttttactaggattagtttctcttgttgtttcccggatgttcaataaccatgctttcgcctgttttcttgttgattttctagtaacaacggtggttcttatcgggtttcgggtgatgcttgtatttgtttatgatttggtaatatctctgtatcgttcaagtaaaacgagggtgctggtgtacgggacggatgataaaagtgtggcattgaagaaaagaatgcacacgagtaagcactatcacgtggtgggattcgtgaattcggataagcagcttaagtcttactccatttcggaactgccggtttattattttgaagacgaggcgaattttgcttgtttcgtgaagaaatacaatataaatggtctgctatttccttctccggagacagctcaccgggaggctgaagggttggtacgttactgtcaggctcatggagtgaaaaacttggtggctccacccatagacgttttgggggacgggttgaagaaaactgttatccgagaaatccggatcgaggatttgcttggtagggaggaaatcgagataaacacaaaggagattgaagcgaattttgccggaaaggtcgtgatggtaacgggggcagccgggagtatcggtagcgagttgtgtcgtcaactggcaactttgggtgtagctcatttggtattgtttgataatgccgagaccccgatgcatgaactccgtcttgaattggaacggaatttttcaagcttaaaatttaccccttttatcggtgatgtccggcagaaagagcgtttgcaaggagcttttgagaaatttcatccgcaggtggtgtttcatgctgcggcctataaacacgttccgttgatggaagagaacccttgcgaagccgttcgggtgaacgtggttggttcgagactcgtggctgacttttgtgtggagtacggggtggacatgatggtgatgatctcgacggacaaggcggtaaacccgactaacgtgatgggggcgtcgaaacgtttggcagagatatatgtgcagagtttgggactggcgatggaacgaggagagatcaggggaaagacccggtttgtgaccacccgattcgggaatgtgctgggaagtaacggtagtgtgataccgtatttccgaaaacaaatagaacaaggtgggccggttacggtaaccgatccgagaatcactcgctttttcatgacgatttcggaggcatgtcgtttggtgatggatgcggcgacgatgagtactggaaatcagatctttatttttgacatggggaatcccgtgaaaattgttgacttggcagaaagaatgattcgattagccggatatacgccaaatgaagatatcaaaatcaaattcatcggtctgaggccgggagagaagttgtacgaggaagtactaagtaacgaggaaaatacggtacccacgggacatgataagattcgggtggctaaagtccgggagtacaagcgagaagaggtgctgggggcttacgatcagttggcagaattggcgttggcggtgaaggtggaagattccgtgcgattgatgaaacaggtggtgccggagtttaagtcgaggaattcggtgtacgaaaagttggataaataaataagaatttatgatcaaagtattagtcacgggtggtgccggttttattggttctaacctttgcgaggcgttgcttgaaagaggtgatatcgtaacttgtttggataattttgccacagggcatattgagaacttgttaccgttgattgaaaaatatcccaattgcttcaaattagtcgtgggagatattcgtaagctagaggattgtcgtaaagcggtaaaaggaatggaatatgttttgcatgaagctgctttaggatcagtcccgcgttcaatcaaagatcccattactagtaacgaggtcaacataaatggttttttaaatatgttgattgcatctagagatgagggaatcaaacgttttatttttgctgctagttcttctacttatggtgatagtcaatccttgcctaaggaggaagatgtaatcggtaaaccgctttctccttatgcgataacgaaatacgtgaatgagctttacgcagatgtgtttgccagaacttacggtatggaatatatcgggttgcgctattttaatgtatttgggagaaggcaggatcctttcggtgcttatgctgcagtgatccccttgtttgtgaaacagttaatgaggcacgaaaatccggtgatcaatggggatggggaatatagtagggatttcacatatatag

SEQ ID NO: 408 - DNA, 4178 bp, Butyricimonas faecihominis
atataaaacttttttcaaaactatattaaagcaactcttgcaatctctcctctgtcttcgggctggaaggagccgtcatatacgcctccacgatatttccttccggatctaccaaaataaaccgcggcaagttgctcaccatatacgctttaccaaatgcaaggtcgtcacccatgtacaattggatgccatccaagccctcgttttgcatcgacttcaaccaagcctccttatccgtgtcgcaagaaatacccacaaaaacaatatttttccccgcaaacttcttctccagacgtttcaaaaaaggtatctcccgatggcagggaccacaccacgatgcccacaaatcaatatacacaaactttccgcgcatcgactctagcgacaccatcttcccattcatatccggcaagttaaacaccggggaaggcgtgcccgggcgcaaactactccacgtattgcacatctgctcaaaaagtgccagttttgccgcactcttcacgtttattttgtacacctccacaagatcctcctgtccctccaatccgcactccaagatatactcgtacacgaaatcatgtatcaattcttccacgaggatggaatccttataattttccacgatatatttcacctctcgacgaatcaagtcattgggggcatgctcctccaatcccttgttcactagagtagctatcgacctacgtacataattgtaatatgccgtcatcccgatcaaatccttgcgctcttttgccaactcccgcagggtcttgtaatacgcctcccctggttcaaaagactcattccccgtcatccaacggtggttcatccggtaagaataccacaaaccatacgcctcgtaacgtagacgctccttttctacggcaacaaaattctctggcaattctcttttctccaaattctgccagttcttttccagtaacttcttcgtgttttcgctcaattcctcctcattaccggaaaaatacgacaactcaaacggggaaatcgatgaagacaaataatcgttgatcgccttcgtctctcccgtgaatttacggttccagttatcctcgttcccgtcaaattccatacccataggttcacctcccatcaagtaaacgggataaaccttccgcccgtacatcacctccgagtactgcggggcaatctgaaacgctttgatctccaccactccatcctccggcacctcaaaaacctgctccttcccattgatgttcatacgcatcacttcatcctctactggattcgtgatcgtgcatttaaacaccaaatctttcaattctactttttttccttctctcgaaccacatccccaaacaaacaaggttaaaaataaacaaaacaaactccttctcatctttattcatttaactttttactataatccgttttttccatcggagcagcgggacaactcaatccagcctctttcaacaacccgtcaatcaaatcagccttatgataaggagcagagaaaggatcaaccccattataccgcacatttcccttggcatcaataatcacgatatgtgggatatccagtactccataatccatgttcatcacattctgactagtgaaagccacccgccagttcatattctggtccttcatgaaagttctcatcaactcaaactcgtactccggacttccttttgtctgaatagtcttcccattcttcacgtccacatggtatcccatcacggaggttaccccgataatttccacgagatatcccgtatatctcttcgttaaggctctcatattcggcataatcccgatacatggcccgcatttagtcgcccaaaaatcgagtatcaccacttttcccttcaagtcatccaagcttttctccttcccgctactcatccataagaaattcagctccggcgctttattcccgaccaacatccccgtagcataaggtccttctaaatactgaatagccaattccactcgtgctcgacgtcgtccctctctgtaacgctcagtagataacaaacctgtatattgttttaaaactttttgcctgatctcctctttttccgcagtagaaattttttccgccacgaacgccgcattaaacacttccatggaaacgaatacggcatcatccgacaacgacatatccaacaaagacttcacgttgtccaaaataccagactctacccaagagtctcctcccacatgagccgcacctttcagcacgtctaccaatatcttttcgttaccggacaagacgctgcctattgacgtattggtaagcatcagcttatacaattccatttctttagctgcgatttcttcgaatcctgtcatcggtacatatctccaacgataataagaagcaattgccccagcttctccggattgtttcgattgtgtttccaatatcggggccaaccattcacgcaaataactgtctaatgacgccccacccacatcaaataataactctacttgcgacggactgattttttgtatatcataattctgctcatttttcgccactacctcttgaaaggccttacccttgtcaccttcctctagattgcttatcgcaaaagcagcattcctacacaaatccttcaattgctcatccatcggtgccttaggaccgcaagcaacacataaaagtacaagtgataaatagtacaaatgtttcatcataattccgtttctaattgaggtgtgtcaaaatgatctttggcacacctcatttttaatccatttatttttactcgttgtaataataaattatagactgctcttcttcatttttatctatccaagatattatttgttgcatcattcccctgtcacccattgtaacatcagaaatttcataagatattaactcggtaccaccatctttcatggaattaaagaaataacgattgtaaacatattgactaaaagtcattccatacaaatctaaaggaagtaatgcaggcaaattctccatgtatagcggatttattttctccttgtcagtaaaatcgaaagaatttccggataattccgcatccatattgtctactcgcaccatttcaccttctttctctgcatattgaggagcgtataactcaccatcgatattgaaactcttaatagaaccactctcgtaaacaatatttgttacgtaatcaaccccatctttagttacttttacaacttcttcaccctcatatgtgaactcgtaagtctctttagtttcctctatctcataagtcacctcattcaaacgttgtactattttctcaagtttagtgaccatatcattttctccataataaaaatcaacgatatgataccctgacatagtttggggatccagtgcggctaaccgatataacttatctgcatctgcaatatccccgagaatatctatattcggatgatattctccattcatatccacgtcattaacttggaatacaggaacatcatataaattcatgacaccaagtacacttttaaatgtcaacccctcttttctctcaacaacaaccgatttattaaactcctgatctttttcatcgaccacaacaatcgttaccttattatccccaagttccaaatcttcaatacgaacattaaaatcatatttttcctgttctgactccatggacaaatcgaacttaacatcatcttttccctctactttcacgatcatctctttcaacggaattaacccccgaataaccgtcaatttcaagttgcaattttcagagaaagtcaagatttggtcagctgtaaaccgtacatccaattctgagaattttttaatattcaacgtgatattttgtgtcactatttgtccttcacgatcttcgactgtcaaggacaacatcaacgtcgtattctccgtgtaggtagtcaaatccacgtcataggtataagtgaaggtattgggatcagcgaatgaagtttgctcatccagcactttattagaagatttatccatcaaagtaatcttagcaatcccctcttccgaaacgatcggcaagttaatcttatacgtatcagccgtgtcacgtttcaactccaatgttatatttccatcaccctcgatcaccggagccatccccgggtcatcatcggaacaagctataaaaccagccaccgccaatagggccaataagtaattc

SEQ ID NO: 409 - DNA, 4164 bp, Butyricimonas faecihominis
gttacaagctatgtgataaattattcaatctcttctttcaaataaacagcaaccgattctagatctccctccatgaaaaattccactttcaattacaacatgactcaatgtatttaatccatactatcatttaagtaaccaaataaacatttcctttatctacattccatcaaaggtgtattaaattgattttcaaaattcaaacttcatctccaacagatttccacaaaacattgatttgtttgatcgtacaataaagttgatgtaatcgacatatttcctgcctaaaatattgaaaagcgatatgacaaaaggagcaaccttgaatttctgtccatcaatctcgtttactagactctcaaacaattctctcaattccgtaattgtatcacaatatacaaaactattgcttcacatccaattgtgaaattcaaatcaaacccactatatttaatataaaaaactgtcagcacctctataaatagagatgctgacaacaaaaataataacgtgtttaatataaaaatgaacgttagccttcttttatttctccagggagttttcttccttaaggtactccctatgtattatcggaagttttaaatacggatacagagcatttgataatatcggtctcggaaagaatggcatagaggccaataattcataagcccgtttatagtttccctgatgagcataagctattgcagaatacaataaggtctgctgagaaggagaactttttaaagcctgttccgccaagtctatcaccgtgtccgctaatttgtcttgaagtgatgttttttcgaaataatgagcaataatcaaagtgtagaaaaattctcccgccaaataaggatggcccctccgataacgttccgtgagcatcatagcctgttgtaatccttgtttgtatttttcttggaataaaagtaattccatatctatgatttcaagatacatttgggacaaaggagattttagagagattaaaaaatctcgataatcttgaaacttttctccatctccacgtaagatcatccccgcacgcacaaccattcggtacatatgctgccaaaattcaggatcgtatgtacaataaacagacgcatttgccatcaagattcgaaaagccaaattatctccagcgcttcgcatgaatcttcgcaaaattttgtaattctcgtggcttttcagttgttcttctgattggctacttagatattcaaacactaatggttgtacagaatcaggttgtatcttggccaaaactccaaacacatatccttcgagcagatctgccgaacgttctcccgcttcccaacgtttccgaccttcttcccaacgttgactcaaattagactcactcacttgttttgctatttcaatgaacttttcggcttccgtatatcctgtacacatatccaatattttccctgtcgaatctagccaaaagaacgaaggataacagctggcttgataacgcttaaaaaagccgcttgtcttttccttctccgcatccaactgtaaagatacaaaatgagtattgaaaaaacttcctacatcggaacgggtaaatacctctttagccatcatcttacaaggaccacaccaagaagtgtaaacatcgacaaagatctgtttgttttcttgctgcgcttttttcaaagcttcctcaaaagaaccccggaaaaagtttataccttgaccggtaactccaaaaactgtcaaacaacaacacaaacttattaaaatagtccttttcattttattattaactatatttttcgtcaatatctatcacggtatcacagaatccagatttaccaaataagaaatcggcatgaattcctccttgagagctgacctcgtaaaattcaactccaccctgtaattctggcaagctcaaattgcgaatacacaaacgaatttgcaaagaagagcgagtttcatccggttggtcggtttcttcttgaatcgtgataaacttcataccagtaatttctgtattctgattttcaggagtaacgagaagcgcttccagtgatgaagaagtatttgttgtaaattgattaaccgaaaaagcaaatacttgctcggaagttgcatacaccaatatatctgaataatccgagttggatgcaaaatacgcagcttcatatatatggggagccacagtttcaggaatttcttcacacaaagtggaaacaaaattaccctcattattaattctgaatttatatatatacaatttccttgtttcactattcctcatcaacatccaataagcattggtttctgacaagtttccgcatgcttccatctccatatttgttcccatggcattgcaatcaaatctagacagatcagcattttccgtatcgaattgatacaaagcccccatattccaacgcgtatgttgcaacaaacgtttattcagtcggtcataaaaagtctgaaccccatcaacttccattacaaacggggctacttcgtaatttcccactccgtccatacataccaaaggagcctcccactgcaaatcccccatattaactccacgtttacaaacctgaccgttaataataatataatcaatcattcctcctacaaaataaagctggggattcaatacctcaccagaaaaagacgttgcaaacgcatctttcacaggacttaaagcctcaaaagatactggactagctaccattccgccatttccgtcttgacagaatatcagttcctgtttcaagtcaggataatattcactaggatttaccgaatagattttaacaggggtcttcccgactctctgattactatttgcccgaaaataaatattctccaataaatttctctctccttctttagtcaagaaattaacttcagcctcaccgttttcttcacaaagtaaaagagttcctttagtatattcagtcaacacttccaatttcatatctttccggtaatatactccagaagtctcgtcagtaactttaaccgtaagtgtataatcttctccgggagtggcatgagaaggatcaatcattacattcagatccttttcccgacttagagtatccgcttcatttctagttgttgcagtcgaaagataccagagatatgaaaaaggagtttcttcatcactgctagttgttatagaaagtggtatgttcaaataatcatacaaggttacagagtacttttcatttaatccgataaaggtaaccttatttaattcccgagaaacatccatactgtcatcttgagagcatccgtttaatcccaagaacaaacaaagaattcctaaatattttatcattttcataattccaatcttttaaggttaaaaaggatcccaaggtgcaatcaaatccccgttttcatcatattcggtgtgggtagcataatagttgcagacctgacgaccagcacgcatccagtaagaataacccgatacaccattataatccatcaaatcttcttcttttaatggaaaatcatgccccataatttctatgcatttctgatgttttgctttagaataaggtccaaaatacaaggataaaggcatatcccaataagagggcctaatcaactggttcgtaatcagtatacgtacatgaaccctatccgtataagctaaagtcagaccatcatcaggttcaagagtcaaagctaaagtcactattttatcgtctaattcatctccttttttcagtacatatatcggaactgttaccatggcttccttagccggaaaaacataattctctgctaaagtttgataatggagtccttctacagcagaagatgattcattgactataaaatgaaaattacgtggctcatccaataatcttccggccagtttcacgtccaattttacagtatcaatatctccaacagaggtagtaaaagtatgatacacactatcaacctcattgctatattctgaaagataaattcccggaatatttttccataccatttgctcattttcattgcaaccagtcaataacatgaccgccaacaatccacttatataaaaactttttttcatagtttatcagtttttgtttccataatcttgttcgtcaacaggcaatggtaatacataaacctcttctggaacaacagttttagtcgagtagacccccatac

SEQ ID NO: 410 - DNA, 4154 bp, Butyricimonas faecihominis
tctactagcaaagtagccgtcatagcttaattttcttgggtattaaacaaacgggttaaatctccaacaattggaattgcaccatactttccggataagtaatctttttcaaacgaagcatcgttgcgcactttatactctgctaatgaataaagttcagttaccccataacggtctttttgtgtaaaccaaatctgatctcgtcggaattgtactttcctgaaataggtttactggttttgagtaaacttttttcaggacaatacagtccgcatgaaaatattgtgagtttactctaatcttcaatagaaaatcgccaaatttaaatagcaggattagacatgaaattcacgcttggcaagcgtggattgctgtctgtttgcaacaaggcgatgcctctgtttagatagaatttgcaatcctcgcttttttattgtataatttttgcttgggggattgggcagaattaacaggcgaaatcatcaagcaatgaacatggacaaccttcagttaatacaaagcaagatacacgagatccggggcaaagggtgatgctagatctcgatttggcagaaatgtacgggacggaaacaaaacgtctcaaggaagccgttaggcgtaatacgaaaagattccctcacgatttcatgtttgaactcacgagagaagaatacaattctttgaggtcgcaatttgcgtcctcaaacacgaggggtggtactcgttatatgccttttgctttcaccgagcaaggcgtggcaatgctatcttcgatgttaaatagtgatgttgcgattgaaattaatatcaatatcatgcgtgcttttaatgccatgtactcgcccgattcgcttgtcgtgaaagcaaaattggacgaggaagaggacgcgtatcaaatcgaacacaagataccgtggcaatccaacgagatggacggcgtggaagggacattacctatttactttcagatacggggtattaacgggggacaaccggaaatcatgaatcaattttcaataaaaccgacaggagtgatcgaactcccgtataatcatactgttccaagtggtcggtatattatagacgtgaaagtcggaaacagagatcacggttacacgattgattcagctttcacggtgattataaagtaatgaacaaggatcacgctattttgccaagacttgaaaaataatttagtgttttttttgtttatgagataattatttatcatctttgcaataacagaacgcaagacgttcagtttttattgatagcgtgcaattatgcactgtgagtggaagctagcaactttttataggatcacggtgattgcaacgcttcgaacctgattacgtatagtaatatacatagtcgggtcgaggcttgcttttcgtatcctaaggtttgctagacctccactacgaagagcagcccggtccgattttataaatctcccggattgctaaaatatagcaccgggattttttattccggtgcaaacttgaaagcagccggaaacgcacaggggagccacgttcatcttctcacattagtagtttgaatcccacccggctgttttctttaaaaataggattgatcggttaaatacttgagcgcggggtatttgaacttaggacaacttgatctgatgaatgaaattgatagtttacaaaagttagatcaaaaacagagggggaacccgcgccccctcttttaagatacttaacggcgagagaatctgttaactccttctcgctttaagtccggaaaccgcctcttctcctagaggcggtttcatttgtcatgggataaaggttatattttcctaaatatttcttgccatcttcttcttgaataaatccaatgggatgtctttctgtttcatgctcatttttactgaacattgtaacaatccctatcaacacaaaaagcgactacttttgtaatcgcttctggtgatccgcctgggtcttgaaccatgcggctcacaagtcttaaaatcaatatcttatcgcacctcaatcttttaaggggtacgaattaggcacttttttcaaagagcatttggcttcccttttcgggattgtgtctgcctttatcttcggttcaaagataccactttattttcaaacacgcaaatcattgaaaataaatcttatgcgattagtgcaaggtgcaagctatatatagatatatacttgcaccttgcactaaaaaaaagcactggggtacaaatgcttaaaacaaaatccgtatcttcgtaaccgattaaaaacaaacgtgtatgataataactaaccgtgaagaagtaatagataaagcgttcggcgtatttgtcaggatgaactacgagaaagcaagcatcatcacgcttgccaaagcctgcggggtgacaaaaacgggtatcgtttattattttccgcacaagctggatttattcatggctgtggcggacaaatacgtgttgcaaatgcacgaaccggaaaacaagtttgccgctcctgccgatacgttggcggagttcatcgggcaatacgtggcgggggtagccgcttccatgaaaaggattgttgaactgattggtgataatagtagcccgcatgattgtagtcctaacttctactactttcactttctgtcacaagtgcgtatgtactatccgggcatcaggcagaaaattgagaaaatctaccgacaagactatgacctatgggagaaagtcatacagaaggcaaaagaaagcggggaaatcaggagcaacacggacgtgaagaaaacggctatcatgttccggcaaatgtttttagggctgtcatacgaacaagcatttctaaacggtttgaacgtggacgaactggcagaaaattttcgccatatctattcgctgcttaaagcctgatactcttttgtttttttaacctcgattatttttgaacagatgttcaaataatggtatttttatcttatctttggagcgaagcaaaattcagcgacatggataaggttcagaaacaaagaggaagcatcgtgctacacaaagaaacaagggacggtgcggattacatacggatagaatatgcgaacagtcaggctgtcgccctgctgctcgcccaagacacgggcatggaaatggctggtaacggctctgcatacatagcgtcagccgctttcagcctgccggatttttacgaccgctattcgccccacgcctatattgattacagccgggtttacgtgcggcatcccaagcccaaaagggaatacacactgccgaaaggctatctcgaactgctggaacaaaagcgttacagcccctcgaccgtcaaaacataccgtgcttatttcagcgatttcatggaatatcacaagggacggaacatcgaccgcctgaaagtgccggacatcaacaagtacatactctatcttgtgaacgagaagaagatttcggtgtcgcaacagaatatgcgcatcaatgctatcaagttctattacgagcaggtgaaaggcggcaaacggcaatactatggcggtatcacccgtgccaaagagtacaagagcctgcccgaagtgttgagcaagaatgaaattaagcgcatccttgcacaaatttccaacatcaagcatcactgcatgatttcgttggtttactctgccggacttagaagaagcgaattgcttaacctgaccccgcaggacatcaacagtgaaacaatgtcggttcgtatcatgggcaaggggaagaaatgccgttattcgctcctttcgcccaagttgctggaagaactacggcactactttcgggaatatcgtccacaaaaatggttgtttgagggcgaaacacccggagagcaatattcggcaagtgcattggtgaaagtgctgaaagaagccgcacatcgtgcaggcatcaaacaccgtgtacacgtacacatgctacgccactcctttgccacacacttgctggaacagggaacagacctgcacacgatacaggaattgctgggacacaacgacatcaagaccacaaccatttatcttcatgtgtcaagtgcccataaagcaaaaatccctaatcctcttgatacactggataattcgtgaggtgcagttatagaagtgtaggaacgacaccataaggtgcggttataaataac

SEQ ID NO: 411 - DNA, 4148 bp, Butyricimonas faecihominis
gactatttctgttctattaaatccttgttcttggaacggtgaacccaaatgatcagccccaccagcatcaatgccatcgggggaagaatcattaaaccgttgttttgataaccccaatcgtagaatatttgtgggattacttttaccccgaacaaagttccggaccccagtaattcacggaagaaagctacgatcacgaggactaacccgtatccgagaccgttaccgataccgtccagtaatgaaggccacggtttgttacccaaggcgaaagcctcgatacgtcccatgatgatacagttcgtgatgatcaacccgacgaacacggataactgtttacttacctcgtaggcgaatgctttcagtacctgatcgacgatgattaccaatgcagcaaccacgaccaactgcacgatgatacgtatacgtgtcgggattgtattcctcagtagcgaaagaatcacgttagagaatgccgttacggctgtaaccgaaagagccatcacgatggccggttccattttcgcggttacggcgagagcagaacatatacccagaatctgtaccagaacggggttatttttgctcaagggaccgagcaacaactctcggttcttagctgaaaataatgtttctttatcgctcattattgtatttgttttaagaattgttcgtaacattttaagtagtcggcgatcatcgtctcaactgcttttgacgtgatggtacccccggagattccgtcaacttcgtgtactccggttgcgttaccgcctttcttcaccgtgatggcttttaaagaggagttttcaaaaacggtctttccgctgaattgcttctggaaaaacggttgggtgatctcggctccaagtccgggagtttctcctttgtggtcgaacagaaccccgtaaacggtatttttgtcctcatttaaagaaatataaccccataccggcccccaaagtccaaccccgtatgtcggcaggatgtatttggtggctccgtcaatgtcggccacgaatacagggaatttaatgtccgctaatgctttgtcatctttgattgtttctgaaagcaattttccgtccttcaacgctttttgaagttcggggtttttcattgctttctgaagtttcttaccttcggtcgggatgtccacggcgaaagcgtttccttcaatagcctcacccttgtagttcagaatgaattgttttgtgatgattttgttgaacaattcagccgaagtttccggggtagaactaacatttacagaactcagaatgttttgtctcttctcgttctcaatattctcatcttggtatggctttagtgaaagagacactatcgccagaatggctgcaactacgacaaccaaaacgatggaatagataaaggtatatgtatttccttgtttgttcatctcattaaagatttagtgatttacgatttatgatttacgattgtttttaggtaatctgaaatcatgaaatcttaaatctgaaattgtttagctcttttcagtctgcgcttgatgttaccttgaacgacaaaccagtcaataagcggagcaaaggtgttcattaacaggatggctagcatcataccttccgggtaaccggggttaagcgtacgaatgaggatggccatgactcctaaaatgaaaccgtatatccatttccctctttccgtttgtgccgatgttacagggtctgttgccatgaatacggctccgaaagcaaaacctcccatgattaaatgagtaatcggggtgattgccgcgtacgggttggttgcgggtaacgtgtagttcagtaataaagccatgcagtaacctccgatgaaggtggaaagcatgattttccagctcccgattccggtggcaattaacaagatggctccgagcaatatacagaaggttgatgtctcacccacggatcccgggatcaatccccagaacatggaagacatatcgtatgtcgtgggcaggccttgggcagcctcggcaagcggggtcgcttgcgagaacccgtcgggcattccggcgatccatactttatcccccgaaatcatggaagggtaggagaagaagaagaacgcacgggctaataaggccgggttccagatgttcattccggtaccaccgaagatttctttaccgataatcacggcgaaggcggtagaaactcccaccatccaaaggggtgcattaatcggcataatcatcgggatcaataaaccggatacgaggaatccctcgttgatctcgtgtcccctgatttgtgctgcggcaaattcaatacccaatccgaccacgtaggaaacgacgatcatgggtaacactctccatagtccatagaagaataactcgaagaagccggtatcggccagagtacccatagcattgaaatgctggtaccccacattataaataccgaataagagggccggaatcaaggccatcacgacaatgatcatggttcttttcagatcaatcgcgtcccggatattacagcctgaagatgtcgtgcggttaggcacgaaaagaaaagactcaaaacccgtgaaaacggaatgcaacttgtatagtttgcctcccttttcaaattttggcttttgcttatctagatagttgcgtaaaaaattcatctttataattttaaatttttgattttagattttaaattttgaatcgtgtcccatcaaggaattgacaatttaaaatttgcaatttaaaattagcttagctcttttatcattaactctatacctttgtccagtatttcctgtaccggagttttagaggtacaaacgaactcgcataaagccatatcttccggggcaacctcgtacataccgagttgttccatcttgtccaggtcctcagccagtaccgcttttagcaggtaaacgggaaggatgtccatgggaagaactttctcgtattgtccggtcaccacgaaggctctttcttccccgtgatagttggcatcaagagtgtacttcttgttcgggcataagaaagaggggaaagtttttgatatggagaatttgttgaaaccgggagttgcccaacccaaaaattcgtaattatcaccctcaggaataacggttaccatattattataatatccgagatagtcttcttcagttaccttgtagcccgtgagtacgttaccggaaataatgcgttgatgaactagattcttcagtttcccgttcacgatacaaccgatttttgcccccagaatggttttgtagtaagcaggcttttcaacttccgaacccgcgagagcgatcgtcttgcgagcgtcgaattttccggaagtgaataatcgtccgataatggcaagatccattgcgtttaccacccaaacgatttcccctttgttgatcgggttcagatggtgaatctggattcctgcatttcctgccgggtgtggtcccgcaaaataattcacatccacgtttttcaacttggcgaacacggatgttgaaggcgtcccttctttcaagttcaaattcacgtttttaccgcataatttttttaagcaatcgattccggattggagtgcggttagctcgtctgcaagagtaatgtcgaaatccggagcgagaggagcggaatcaaaaccggacacgaatatcgccttcggcatatcagccggggtagcgatgatgtcgtacggacgttgtttgatcatgggccaaacaccgctgtcaagtaatttttcgatgatttcgtctctggaaagtttgttcacgtctgctgccccgaaatccttgtattggatttgggcatccgctttaaccacgacctccagcaatttccttctttctcctctgtttacggtttcgactgtaccgctaacaggtgatgtgaatttgacttcaggtctgtacttgtcgataaacaacacgtcacccgctttcacttgatcgcctgcctttactgcaagtttgggagtaagtagacggaaatctgtcggttttaccgcataagaatcacatctctcgatgtttttcaccagattttcggcttctccttttaacttgatatcaaggccttttttcagttttataaccttggacattgttctattatgtttttgatatgtagataattatttctaattcaccctgtaattgtt

SEQ ID NO: 412 - DNA, 4146 bp, Butyricimonas faecihominis
agaaaataatgtataatgaacagaatataaaaagactacctcaaagtaaatttgaggtagtcgaaatattaggttatcctaagaatgacaataatataccggctgcaacggcagaaccgataactccggccacgttcggccccatggcgtgcatcaacaggaagtttcctggatttgcttcttgtcccacgttctgtgatacgcgggctgccatcggaactgcagaaactccggcagaaccgatcaacgggttgatcttgttcttggtgaacaagttcatgaattttgccagtaatacaccaccggcactacctatactgaaagctagaacaccgataaccaaaatggctaacgtttgcaagttcaagaatgcagctgccgtagtggttgctccaacggagatacctaagaatatcgtacagatattcatcaactcattttgaaccgttttactcaaacgttcaacaacaccacattcacgcattaagttacctaacattaagcatccgatcaggggagctgcagaaggtaataataatgatacaaatatggttacaacgatcgggaatacgattttctcttttttagatactttacgcaattgtttcattacaatctcccgttctttctgggttgttaacgctttcatgataggtggctgtatcacaggaaccagtgccatgtacgagtaggcagccacggcaatgggaccaagtaatcccggtgctagcttggatgtcaagtaaatcgcagttggcccgtctgcacctccgataattccgatagatcctgcctctgcataagtaaagcctaatgcaagggctcccaagaacgtagcgaagattccgagttgggcggcagctcccaaaagaaaacttttaggattcgccaataatggaccgaaatccgtcatggctccaacaccaataaaaataatacatgggtaaattcctaattttactcctaggtaaaggtagtccagtaagccaatgttattggcattcgtgaaagcctcccaatgtacatgtcctccatcaaaaagttctggatggaataatccggctccgggtaagtttgtcaataacataccgaaagctataggcaacaataataacggctcgaatttctttacgatagccaaataaaatagcacgcatgccacgactatcatgactaagcacagccaattcccggcgaaaagttgggcaaatccagtatcgttcaagaatttggatactttttctcccatatcaacttcctctgcactagcggcaaaaggcatgataaatataccgagtaataaggctatttttagcaggtatttttccacttgtctcattttcaattgttttacggtaaattaaaccaaatcaacaagcgggtcatcctgagaaacactctgaccagcagttacatgtattgctttcacttgaccgtcaacacttgccacgatattgttttccattttcatggcttccatgactaatagacaatctccgcgttttacttgactgccaactttcacgctaacagcggaaatcgttccgggaagcggtgctttaatgcaggtcgtcttgttgcttgttgcagatgtactttgagcggaacttttatatgtagttgaagtcggtatggcagcaggtttacgaggtgcggtggtagcaaccgtgtttttgctttcgtatgatacttcataagatataccgttcacctcaactgtagctttgtcatgatccgttacattcacagttacatcgaaattgttttcgtctatggtgattttgaatttattcataatctgtttattttacttattaaggtttctcataccgtaaattttagaactccacggagaataacgtttttcaacttcttcgatcgtgatcacgtgaggttcctcgtcatgagagttgaaatatagatgcatagccatggcgatggcagcttgttcgtgaggtgtcggatgggtatccgttgtcactactgctttttccgtgtcttgaactgtttttgcgtgatcttctacttgattcgtcaacttggtctgtaagttaataatccagatcaaaagaatcaatagcagaaatactgttaccatccccacgcctgtaacgaggagtgcgtaaccccagttaattgctaatgtaatcatatgaattacaacggtatatttgagtgtttcttcatcgggttaacaacgcgcttggtctgcaaagactggaaagcacggataatgcggaaacgcgtgttacgcggttctataacatcatcaatgtatccatatgaagcggctttgtacgggttcgcgaatgccgagttgtattcttcctctttcgtggcaacgaatttagctttttcctcaggatcagagattgctgccaattctttaccatacaacacctcgatagcccccttagctcccataacggcgatttgtgccgtgggccaagcgtagttgaagtctccacgcaattgtttacatgacatcacgtcatgagctccaccgtatgattttcgtaaagtaacggttactttgggaacggttgcttctccgtaagcaaacatcaattttgccccgtgagtgataataccaccatactcctgtacacgtcccggcaagaatcccggtacgtcaaccaaggtcaacaccggaatgttgaaacagtcgcagaaacgaacgaaacgtgccgccttgcgagatgcttcaatgtcaagaactccggcatagaaactcggttggttagcgataacgccgacagaacgtccacccatacggcagaatccgacaataatgttacgagcataacgtttgtgaacttccaagaattttccgttatccacgatgccttcaatgacatccatcatgttatacggtaaattcggattatcaggaattatttcgtttaaccggtcttccaaacggtcgatcgggtcattgcatacggcaatcggagtctcttccaagttgttggaaggtaaataagaaagcaaatcacgaataatagcgataccctcttcttcgttttctgccaagaaatgagaaacaccggatttcgtggagtgaacttctgcacctcccaattcctcggttgtgatatcttctcccgttacggttttcaccactttcggaccggttacaaacatgtatgatgattggtcagtcatcagaatgaagtccgtcaaggcaggagagtacacggcccctccggcacaaggaccaaaaatggcagaaatttgcgggataactcctgaagcgagaatattccgttcgaaaatttccgcgtatccagctaaggagttaaccccttcttgaatacgggcaccacccgaatcattcaatccgataatgggagctcccacagtcatggctttatccatcaccttgcaaattttttgagctaacatctcggaaagggcacctccgaaaacagtgaagtcttgagcaaaaacaaatacgagacgtccgtcaattgttccttgtccggttaccactccatcacccaagaatttggttttttccatcccaaagttataacaacggtgtgttataaacatatcaaactcttcgaaactattttcgtccagcaacatggcgattctttcgcgagcggtatatttcccttttttgtgttgggattctatacgcttttcccctccgccaagctttgcctgcgcacgtaattcaattaactctttgactttatcttgatttgtcatattatcaaaatttatatgagctgattattaaaaaaaattattttgttccgcaaagttcagtcaatactctgaatgttgatttcgggtgaaggaatccgattctcaatccttctgcacctccgcgcggagctttgtcgattaactggcaacctgcagcctgtgcatcattcaatgcggcttgaacatcttcaacggcgaaagctatgtggtgcataccacctccgtttttctcaacgaatttaccgatagggccttccgggtcagttgattccagtaattcgatcttagtttgtcctactttgaagaaagcggtttttactttttgatcttttacttcttcaatagcataacattccaatcctaatactttttcataataggggattgcttcatctaaactggcaactgcgatgccgatgtgttcaatat

SEQ ID NO: 413 - DNA, 4143 bp, Butyricimonas faecihominis
attgtagatggataaataaaatgaattgaaagttgtgggaatgaaaaaagtattcatatatttgtcgtaatgaaaaaatgggtaggagagcctaccttgaatatattgtgaaattattacatcttgagcctaaaatcgccaaatttaaagcacacaggatggacatatgttcacgctggcaagcgtggattgttgtctatttgtgtgcaggtgtttggcgataccgaggttcaaatagcacagtccccgcttttttattgtataatttttgcttttggggattggggtaaaactaaaatttacactatgaataaatcgccagggtaaaaaattaaagaaacttatctagccatattcacaaggtgaaacttggaatgcttttatacctgtttctaaacaatgtttttgtcttcttgtacggtatgctttttatgattgaggcaatgattaaaattgaatattcgtatgaaaagattgaatgcttgtagaaactaaggttgaattctatacaaaaaagagagtccaacgcctaggaaaccttggaactctcctaaaacaaaaatgttttattaaattatgtagcgcaaatttatggaaaaaaagcgaaatcacgcttggtcatgctatgggatagcatggcgcaaaatgttaatgtttacgaaattattcggaatcttgttgtttgttgtgtatatgtttttgcctgctagaggaatagctcaggaaggagtcgcgtcaaagaaagaaaaatccaaggtcttacagggatgggtgtatgataagaaccatcaagtcttgccaggtgtaacggtgaaagttgccgggacgtcggtaggaacttccacgaacgtgaaaggttggttcaggataaccttacccatacaacggggtactttggagttttcttttatcggttttaaaaagcaactagtaaattttacggataaaacggatacattacgaattgttttggaggaggaattgatggagttggatgaagtcacggtatccacgggatattataaagtggataaacgtcatttgacgagttccgtgaccacgttgaagatggatgacatcatgcaaccgggagtcagcacgttggaccagatgctggaaggtcgaatcccgggaatgatttttatgcagaatagcgggcaagtgggagccgcacccaagattaaaatacgcggaacaacaaccttgttggggaataccgctcctttgtgggtgttggatggagtcattttaacagatcctgtaaacgtggatccggcgagtattaatgacttggatttcgtgaacttgttgggaaatgctatttctggattgaatcccgaggatattgaaaaattggacgtgttaaaagatgcctctgccacggccatttacgggcctaaggcttctaacggagttatcgtgatcaccacgaaaaaaggaaaggtcggggctccctctgtttcttattctttatcgggtacattccggcaacgtccccgttacacggatcgttctgttgatgtgatgaattctcaagaaaggatcgatttctcgaaggaagtggtacggaaaaaacaagttattccggatttatccagttacgtgggatatgaggctgcttataacgattacgtgaatggagtaatctcttccgatgaatttgttcggaaagtaaaatttatggagacggtcaatacagactggttaggattattaatgcaagatacctattctcatgcacacaccttaagtatttccggtggttcggagaatgtacgatattatacttcattggggtattcgaacgagaagggtaacttgaaaggggaagaaaacagtcgttatagtgccatggccaaggtggatatcaattataataagtttatcatgtctttcagcttgaacgggaacgtgcagaaaaaggaatatacaccccaagaggttggattgatgacttatgccttgaacacggcccgcagcgtgggtgcgtataatgaggatggtagtttgatgttttatcaaagagacaatgatttggcacacacgtattccaagcctttcagtataattaatgagagaaaaaatacagatgatgacattcaaagtaatgcgatcagtatgagtgcgaatatagaataccgactcattccttgtttgaaggccggtatgcaattttcttatggaatctctaattttgaagaaagggtctattttggagaaaagagttggtatgctgcgaatttgaaaaaagaatatgctcctgattctcctaatagtggctatctttcttctgagtcagaaatgcctgtgggtggagaattgcgtctaaatagtactaaaaatgagaattacagtgttcgggcaaatctatcattcaataaatttctggataaggaaaatacacatcaatttcaagcttctgttatcggagaattaagttcaaccctttataccggttttgctataacgaagcgaggatatattccggaacggggaatgctttttgatgacgtaaatttacctgattcgtggggatacctggaatttcctaattatgatggttggttgaaaagtaatccttctgctaaaggaattttaacccataatttgactcgtcaagtaggattggtgggaacgttgttttatgcttataaagatgcgtatatctttaatgctaatatgcgtatagatggaagtaataaatttggagatagaagcaatgaaaaactgaacccgatatggtctgtttccggtagatggaatatacatgaaaatttattgtctgataaatggtggattaataccttggcattaaaagcctcgtttggttaccaaggaaatatgtccgcccaggattctccgaatttgattatacagcgaaagggtactcattgggcatttaatgaattgtattcttccatcaagtattacccgaacccgcatttaaaatgggaaaaaacctcaacttataatatcgagttggaatactcgttgtttaataacaagctagtcgggaatttcagctattattatcgccacacgacggatgcatttatgtccaaaacggtgtcaagaattaatggcgtcagcagttataccgtaaaccaaggaacgttgaataatcaagggtttgagtttgatattaattttactcccattgagaatcttggagctggtggggaaaagcgcggtttcgtgtggcgtataaatccgaatttcggttctgtatttaatcagttggtggataaaataaaatccaaagacaaagttttacaggatgaaattaggtatggggattatctggacggtcgggtacaagttgccgggcgtcccgtgaacacgttttattcctataaatttacgggtttggatcccaaggatggacgccctactttttacggaacggatgcagacgagattgtggacacggatgcggacggtaacgagattacccgtcagaaatcatacgagttgatgacgttgggggatgtttgcatggaagtgatggaacattccggttgtagggagccttttttacagggaagtatcagtaactatttgggttggagaaactgggggttgtccttcaatttggcttatagcgtgggttcaaagattcgcttgttacaaatgtatggaaataataattcggctgtgccggctccggtgatgaatatgagaagagaatttgttcatcgttggcaacgtcccggggatgaagaatacacgaatgttccgggtttgttggatgctaagagctacgagaaaaccaaaactccttggtggaatgataaaccctatgaatttgccgggacgatttggaatatgtatgataattccaatgtacgtgtggcttcgggagattatctaaaattgacaagtttatctttacgttatgttgtcccggaaaagatttgtcggaaaatgtatatgaagtcagcttatctgaacgtgagtggaacaaatctatttacgatatgtagtaaaaaactgaaagggcaagatccctctcaattcggttcttccgagttgattaatatatctgtccgtcctacttatagtcttagcttaaatgtaacattttaatgaatagaaagatgaaaagatatttaatcttgatacttggtgtgttatcttttattt

SEQ ID NO: 414 - DNA, 4143 bp, Butyricimonas faecihominis
atttatatctttggtccaaattaaaaaaacaaaaaataattgtcatgaggatgttttacaagttaattgtatgtatgtttatcgtggggtttgccctacccggaaacgctcaaaacaagggcaaaaaattcactctggaagattttaacttgacctacacgttcaggacacaaggtgtttcaggcctccgttcgctaaatgacggggaacactataccgtgttggaagacaaaggcaaaaagctggtcatgtatagttacaaaaccgggaaagccgtaagcactttactagacttgaacgatcccaagtacaaagctgttcagactatccaagattacgaattcagcccggaagaagaccggattctgatttgcacgaatataaatccgatctaccgtcgttcattcacggcagactacttcgtattcgattttaaaaataaggaattaaaacctttatcggaaggtggttctcaacgtttggcaaccttctctcctaccggaacgaaagtggcattcgtgagagacaacaacatctttatcgcggacttacgtttcggttccgaaattcaaatcacctttgatgggaaatttaacgaaatcattaacggagcacccgactgggtatatgaagaggaattcgggttcaacaaagccttcgagtgggcccccgacggatctgccctcgcattcatcaaatttgacgaatcagccgtgaagacttaccacatgaatatgttcagaggacaatatccggcatacgaacaaaatgccctttatccctcgaactattcctataaatacccgaaagccggggaagccaattcgatcgtgagcgtccacgtttacgacattaaagatcgtgtcaccaccccaatgaatattggtgaagaggcagatatttacatacctcgtatcaaatggacaaaagatccgaaaagattagctatcatgaaactgaaccgtttccagaatcaactggaaatcctgttggccaatgcccgcgtgggaagtacaaccgtgctttaccgggaagaaaataaatattatatcgcggaaagcaacttggacaacttgatcttcatggaagacgggcaacatttcatcatgagtagtgaaaaaagtggttattctcacctctacttgtatgccatgagcggtaaagaaattcagccgatcacttccggtaaatacgacgtggttgatttctacgggtacgatccggtaaaaaaactttattactacgcctctcacgaagaatctcctttggaaaaatatatctactctattgacttgaagggtaagaagaagaaactcactccgacaaaaggatggaatgaagcagaattcagtaaatcattcaaatactatattaatatagtatctaacgcggatatgcctcacgtgtataccctgtacgcggcaaacggtaaagctgttcgcacgctggaagacaatgccgcgttgaaaacgaaactggcagattacaatgttgccaaaaaagaattcattcaaatcccggcagcagacggaacgaccatgttaaatgcatggctcatgaaacccgtgaattttgacgcatcaaaagcttacccgttattaatcatccaatacagtgggccgaactctcagcaagtaagcaatagctggggcatggattggacacaatacctcgcacaagaaggttatatcgtggcttgcatcgatcctcgcggaacggctgccagaggggaagaattccgcaaatgtacctatatgcaactcggaaaaatcgaaagcgacgatatgatcgctgccgcaaaatggcttgccggacaatcttacatcgatgcacaaaaagtaggtatctggggttggagctttggcggattcatgtcatcactttgccttatgaaagggaacgacgtgttctccacggctatcgccgttgctcccgttactcactggggattctacgattccatctatacggaacgcttcatgagacgcccgcaggataatccttccggatacaatgacaactccccgatcaactgggtaaaacacttaaaaggaaacttattgttatgccacggaactgcggatgacaacgtacacgtgcaaaacacttacgaattatccgaggctctcgtacaggcaaacaaacaattcgatatgcagatttacaccaaccgtaaccatagcatatacggtggttacacccggttacagttatacactaaatttgtgaactacttgaatcaacatttgaaataaaatttcaaatgttgattcaagctacaggttggcaggttacaagttacaggtttaacgtcaacgcttgcacgtcaagaacctgtaacttgtaacttaccaacctgaaacaaaaaaaacagataagttgtgattcgatcacaacttatctgttttttttatatcttgcaaacgatagaaataaacatgatctcagcgtaattatctccgggataactaagctgaaatcttaaatcataaattaaaaaataaaaacgttatgagtaaatgtatctgtacgttagaacccaaagctatctgggaaaacttttataaactaactcaagttccacgtccgtcaaaccatgaagaaaaagccagagaattcattatgaattgggcaaaagaaaacggaatccatgctgaaatggacgaggctaacaacatattattaagcaaaccggcaaccccgggaatggaaaaccgcaagggagttatcctgcaaggtcacttggacatggttcctcaaaaaaatgaagacaaacaacacgacttcaccaaagatcctattgaagcatatatcgacggggaatgggtaacagcagacggaaccactcttggagcagacaacggtatcggtgttgccaccggaatggctattctattatcaaaagatattcctcacggtccggttgaagtgttaatcacggctaccgaagaaaccggaatggatggagcaaacggcatccgccacaactggttaaaaggagacatcttgttaaatcttgactctgaaacagaaggcgaattgtatgttggttgcgctggaggtattgatggagagatcgcgttcgactacactcccgaagccgttcctgcaggacataaagcattccaattatcattgaaaggattaaaaggaggtcactccggaatggacatcaacttgggtagaggaaacgccaacaaattatatttccgtttcttgaaagcagtcagcaaagaattagaccttcgtctttcttccgtatccggaggaaacatgagaaacgcaatcccgcgtgaagctttcggaatcgtaactgttccggctgctaatgcagacaaattccttgctaaagtaaaagaatacgagggaatatttaaagctgaattaagcgctaaagaaccgaatctcactttctttgcagaagaaacagctcttccacaaaacgtgatgccggtaaaagtacaatacaacctgattaacgccatcaaggcttgcccgaatggtgccatgagaatgatcgattccatgccggacacggttgaaacatccaacaatttggctatcgtgaaaggtggagaaggaaagatcgaaatctacatgttaatgcgttcttctgttgaaaccgcaaaaacatcgttagctcaagtagtagcatctgtatttgaactggcagaagcaagcaagatcaactttaccggagaatacccgggatggaaaccgaatccggattcagctatccgcaaagaaatggaagaagtttacatgaaattatacggtaagaaaccggcaatcatggctatccatgccggattagaatgtggtatcctaggatctgcctacccacattgggacatgatttctttcggaccgaccatcagttctcctcactctccggacgagaaagtgaacatcgaatcagtaagtaaattctgggaattcttgaaagctacattagctgcaattcctacgaaataataataaaaatagactccgatggcgttatcggagtctatttttttctcatttttcccgaaaagaataaaaagccggacccctcaaataaatcaagtcttgccgatacgtaaaacactagaaattgtttcaattttccctcactttcaagccatttactctatttttaaa

SEQ ID NO: 415 - DNA, 4134 bp, Butyricimonas faecihominis
gtgttataattcaaatcgagcgttatgagcggtgaccatatttttattgaaactttatatggattcaaatgtgtcggacggaatgtcatctttcgtatattcattgttttagggattgtggggattgctctttacgtgtttacgccgctgtctgctttaccttacgttaaaagtatcaaccagcttttaaagcaaccttcaatgggatggatttcccaagcgttgccttcgtctatacccttcacatgtgcttatttgtacaatattttgcaacttttcttcgtgacggtgctcgccatcaacgatacgagattattccacttggatgccatgatggcgttgaacgttcatccgcaaggaaattcagatatttcggtaggaaacatttttggaaaattccttgccttctcgatggctaatatattgatcttcgctttttgtggtttgttgaatcttcttttctatcccaaggtatttaatatcggatattatcttttttattggtttacgctgaaccttcccgttcttgtcttttgcttgggtatatcgacccttgtgacaagattgacgagaaaccaaggcttaaacgtgatccttttggcggtgattcttggggtgttaacaatcccctgttcgatttggttaaacggggtacttgaccctctcgcggcgaggatacccaatatgttttctgatttcacgggacacgtgaatttcgggagttatatactacaacggatatttatcttgttcttcgggattggtttggcaattcttgcagttattccttaccctagaattcacaataacgaacgggcaaagtttcgcttagcttgtgtggccttattccctttgttgtttgccggaggttttgcgattatttactcttgcggattccaatccatatctgatgaacgggaagcatttagggcggtttattccaagtttgcccagagaaaggtattaaaaatagtcgataaccaactctatttgaaagaaacggaaaacgggggaatctccgtgacaagtcgaatgcgtgttgaaaaccgagaaaatgaggctcttccattgtttttttatctgaatcccaggcttgtgatttcctcgatcatcatggatgggaaaaccgttacctttcagcgtgatttgcaagtggttcttgtggacaaggagttggcttctggcgagataacagaagtcgtagtgaattacgaagggaaaatcgacaatagtttttgctttcttgacgtctcaaaagagaagtatatttctccgatggtaaatactatagatatttatcgtttcggttatacccctgcgttttgccagaaagagtataaattacttaccccagaatgtgtttggtacccggtcagtgtgcctccttacgatacatttggttttagacgatccatgttcactcgctacaggttagaggtagaacatgacccgaaacttatggcaatatcccaaggagaagcgagtcgggacacggtcgggaagacgacgttcacgctcaagcatggcatgaaaggtatcactctttgtattggtaattatagaaaacgggagatcgtagttggtagtgacgcattaacgatgatccaaaatttgaagaaggagatgccggatattgtaaaggatgattatccgacgaaagtagcgcttttttacttgccagagcatgaatttatgcttgatttttacgatgaaattcccaaggaaaagtggtcaagtatcatcgaggacgccaaatcttcaatcaaattttatggtgataatggtgattatttcctgaaacgtataatgaatgaagttgcgtttgatcccacgctacagtatccttatagttggatcacggttgtggaggtgccgtgtgatttttacgtgttcccgaggagaaccttacaagagggtgagcgagtacaagaaggaatggtgtttctcccggaaaagaaattctcggaggacgtgtctgtagcctcttataatgacaaagaattggaaattgaatttcgattgaagagagaatttgaccagtttaggaaaggggggagttgtgatctaaaatcaactggtaagggtaacacgagtttcatttactcggacgagtgtcccttgattaatgatgctttgtttttagctttttatccctatttaacttgggtaaataaggagaatatccaatattttgttgttgattatatgaaaaatcatagtttagaagaggcgttgagtgataccttactttccccggaactgtttgattggatattccgtatgaaatgcgcagagttaaaaacgttattagagattaagattggagaacaagaatttcacgatgcttatcatgatttcctcaagcgacatctttttgaagaaactacctttgaggatttttcgcaagaaattttcgccaattttaatgttaggttagactctatcgttatgaattggtttcgaatgaatcaattacccgttttcgagatagacgggcacaccgtctttataaaaggtaagagtgatcgagtatacgatttcagagtatttaactgggggaaagtcccgggtattatcaatattaatacgaatggtaagcatccgggatggatcattcccccgggagagggacgagcaatcagaacgtatgggccagctcttaattccaatgtttctacatatatgtctttaaatgttccgaaagatattgaattatcaagcgagcgtggggaggctgatattgatatggacacgactaagtggtttttacctctcgattcaacttttttttcaattaagaatgagaatgagtttattgtagataatgtcgattcgggattcactattctggaaactagaaaatttaatatagcttcgctatttggaatagttgagactcgtgccaagtattatgagtatcctccttacaatcattggggttttacggtcgataggaatggaggttatggtttccccgtaaaaggagcgtattttaaacgagccggtaagggaaatcagaaagtacaatgggaaaccgatttacctgagggagcatacgaggtgttttgctatcaaccttctagaaaaaatagaggtggtgatgtccaaagggagtattattattccgtgtttgacgggaaaaaagagcatgaggttatacttttgatggacaaaaatgatggaggatggatatctttaggggtttttgattttcaggggaggggaagggtgactttgagtgacaaggatcaaaaacatgattccattgataaacatgattccccacaagtaatcattgctgatgccatgaagtgggttaaagttcaacaatgatatagattattattgttgaacaattacttctagttatcctagtaaaactagaagtgaagttgttgttgattaattttttgggtaacaagtgcgtaaaatagaggatcgtaatttcgtctggtatatttacaataaaaaacattgtgtccgattttaattgggtgttatttctggaaatatattaactttgacgggatttcagaaaacagaatggttatgaaacatattgcacggctgatattgaagatattcggatggaaactcaagggtggcttgcctgaggataaaaaggcggtggttatatccgtaccgcacacttccataatggattttatctggggaaagttgacttttataagtcaaggagttcctacttatattttgatgaaaaaggagtttttctttttcccgttgggaccgattttgaaagcgttgaacgtgattcctgtggatcggggaaataaggagaatcatatcgtggagagaatggtggaggaattcaaaaaacgggatgtaatgtatttgaccataaccccagaggggagccggaagaaacggaagaaatggaaaaagggatttctggtgattgctaaggaggccggggttccggtgtatctaggacgtattgattacaaggataaatattgcacgtggggcccccggtttgaaccgacgggtgatccggatgcggatttgaaatacatcatgtcaacatacaaggatgcgaatccgcgtcacccggaaaacttttccgcgggtgattaaaagaaattagtattataaataaatagtatatatgaa

SEQ ID NO: 416 - DNA, 4133 bp, Butyricimonas faecihominis
tatctatactatatcagcttttaatggccaatcctaaaaatataacgatgcatctattacatggcaggttattacaagtggaagccattttcaaaggatgcagggatttttttctattaaaacataaaagagaaaacatatgaatattcaggaagcactatacatattcgagtatatctgttggattcttgcaagtgttgccgttgcatacccactaatttattctcttgcctccctaggaacaagaaaatcatattacccgacagccaataaacaacataaattcgccatcctgttccccgcttataaagaggatagggttatccttccggtcgtggagtctttcctacaacaacactatccacaagagctgtacaaagtaattgtcatctcggatcatatgcaagaaaccacaaacgaacggttggctcaactcccgatcacgctactcaaagcaaactatgaaaatagttcaaaagcgaaagccctgaatttcgccatggaccacttcgaacgggatgaatttgatgccgttgttatcctggatgccgataatattgttgatacaaattttttattagaaattaataaagtctttgatgccggagtgcaggctatccaagcccaccgaactgcaaaaaaccgaaacacggacattgcggttcttgatggtcttagtgaagaagttaacaactccattttccgacgtggacatgtaagactaggcatatcctccgccctaataggttcgggaatgatattcaactatcaatggttccatgacaacgtaaaacacctcgtcaccacaggggaagataaagaattagaagttttattactcaaacagagaatatttattgaatttctggacgaagtgtacgtatacgatgaaaagacacaaggagaaaaaggattttataaccaacgccgccgttggttggcaacacaattcgctcaatggggacgagttttcaaagatcttccccaagcaatcttgtccgggaatattgattacagtgataaactgatccaatgggtgttaccacctcgtcttatcctattcggaggtatcatcgtaatgggaagtattatgcaaatcattgattggccgcttgccttgaaatggtgggctttatttcttatcatgggagtcacgttgtgtctcgccataccggacaaactagtggatgatcggttcaaaaaatcaatcaacaaactacccttgttatttatcatgatggtagtcaatttattccggatgaagggaatgaataaaaagttcgtgaacacggaaaagaatggttcctcaactttataaaaatgaaccctatgaaaatagccattgaagcacaacgtatctttcgcacgaataagcacggaatggattttgtcgctctcgaaacaatccgggaattacaaaagctggatcatatccatgaatattatatactggttgcccccggagaggatcattgtctggaagaatcagccaacttccatattatagaaataaaatgtccgacttatcctctatgggaacaggttgccttaccactagccattcgcaagataaaaccggatatagtgcattgcacaagcaatacggctccattattctgtccggcaccactaatcctcacgttacatgatattatatttttagagaaacgagcacacaataataagtccatgtaccaaaacatgggatggtactatcgtcgttttgttgttccccggatactgaaaaagtgtaaacagattattaccgtgtctcaatttgaatgtaaccgaattcgggaaacattacacctgccggaagaacaaattatcgccactcacaatggtttcagccagcgtttccatccgctagaatcggtttatgacaccacgaaaaaatatatcccgtccaaagaatatttatttttcttgggaaataccgatcctaaaaaaaatacaacacgcacattaaaagcgtatagcgtgtatgtacaacaatctgcccacccattacccctgttgattgcagacctgaaagaagaagtcatccatcaaatattaaaacaagagggtatcgaaaacattaaaaatatgctctattctccgggctatatcacccattctgatttgcccgccatatataatggtgcccggacttttctctacacttccctacgggaaagttttggaattcctcttttggaagccatggcatgtggcactccggtcattacttctaacacctctgccattccggaaatcgcaggagacggagcgatattggttagtccgctagacgttaatgccatcgccaaggaattgctcagactggaaacagacgttccctaccggaatcaacaaattgcatacggcttggaaagaagtaagcaattctcttggcaacacacggcagaacaattactgaaaatatatgaatctatacactaaaaaagaagattatgaatgattatatttctattatcagctcgttgattatatttctatttccatacttgggacgcaaatggtttaatcctcaactattaagttcaacggtggtcagtctcggattactgggaacttttggaggtatcatgtacggcctgtgggtttttagtgtcgagcaaatcgactcatctattccgcaattattggaaggattaaaaacagcctttttaacttctatcgcaggtatgttagcctcattaatcctcaaacttgtacccggcttttacgggatcagaaaagaagagaaacaggaagaagaaatcacagacaaacagttattccaagtacttgaaagtatcgagaaaaatacacaaccgacgacctctctagcattggttcaagagattaaatcttcaaacgaacaactcaaaaataattttcaatccctgaacgacaatctacaaaacatggttgccagagagttgcatttcaacacggaagcgctggctagttctctccaaacagttatatccaatttagacaataggatttcagaacaaattaatcaaaccattttaaagatatacgatatactggaacaacaattacagcatatcatacattcccaagaatttaaccaaacaatacaggaacaacttcaagacactctttctaaattacaagaaacaatacagaacatcgaaaccttcttgggaaaatccaataatctaaacatgaaacaaaatcatgttttcatggagcaagtgacctcattcggtgagtttatcaaaggctcggaacaacaaatgagttctcaattaaaccgtatggaagaaaagtatgaaagggaattaaccgaactggagaagtttaccaagacgttaatgacgattatcaagaaattatcacaagaccacgatacgctgtacaaaaaaacaaatgacgtggaatgaacatctaattgtgtattatgagaatatttaaatcatcgaaagaagaaaaccaatggatgtcaatctcagacttgatgtctgtacttatgatgatctttcttttcatttctatcgtgtatatgagaagtgtgaatctcgaaaaaaataaaataacttccattgcccaaacctatgaaaccacacaggttgaaatcacgaacgatttaaaaaaggaatttacaaagaatctgcaaatctggaatgccgtattggattccttaacgctttccatccgttttgaaaatcccgaaatcttatttaatgttggaagtgccgagttaaacgatcatttcaaaagtattctggatagtttttttccccgattcatacagattctaaccgatcccaaatacaagaacgatattgaagagattcgtatagaaggccacacgtccagcgaatgggccggagaatcctcaccctatcaagcttatttcaacaatatggaactttcacaggacaggactcgcaaagtgttagagtatatcctttcgcagataaaagatgaacaactactccactggactaaaagtaaacttaccgccaacggtttatcttccagtcatctaatctataatccaaatcaaacagaaaacaaagaacgttcccgacgagttgaattcaaaataaaaacaaatgcagaacaacaaatcattagaattttagagcaaagcaagtaacaaaataattctattt

SEQ ID NO: 417 - DNA, 4105 bp, Butyricimonas faecihominis
ttattaatccatcttgatttgactagaaaattaaaccatcagttaaaccacgctaaagacgatcggaaagcattacatgtaatacatacttttgtttgccggagacatccttgtgacacgacgaaattgaaatcacctcctattaattttacttatcgctctttaaaatggtggttatcatcaagcgataagatacgagtatgcggtgatagcacccaactgtcactcaacaaccggaaaattctcataattctgacgagaaaatagattctaattcttcttatttttcacgagaactgcaaacaatcccaattcttatctatttttaacgggaattctacaacgatttttcctgcaaggcgtatcaatagtacaatttcaccagacagatgataacatcaaaagggaaataaagagattgctagcataggtagagagtgagaattcccggggtcacagccagggagtatagtgaatgtagattgttgctagtctcggtgcggttacttcgcgatgaacgtagccgcacttttttattccatattattgaacaatcatgaaaaactttcccgcagattacagatagtctaagatatttggtaattttgtggtgaaaataaaaaagattatggacgatttacaacatataggatatagccgggaggtcattgaattcgttgctgttgcgaaagagttttgcggatacctagaaggttcccacgaagaagatgccagcgagttactttcgaagctacaaaaattcatcccgctaatttacttgaaaggcagtttgttaccctcgtgcgaaagtgacaacctcggtatgatggaagaggtggtaaccgaggaggattacaacgccttgctcgcgacattaagccggacactgggcgagaatgacgaatatctggaagttttcgacgagaatatgcaatacagcgaaactccggtcgtgaactcgatttccgagaaactttgtgatatttaccaagatttgaaaaatttcatttccgcatatcgcagtgggatgatcgatgtcatcgaggaagcattatggcagttaaataacagttttgaattatactgggggaaggcgtgtgccagcgtattaagagcgatacacttggcaatatataaggtagtagacacggacgactccatgtaagagagatagacatggaatacaagacgaagatcagcgaggaagaaatagaagaattaccaaacttcacgtttgacggggagatcatcgtgattgatcatgaagataaagttgacgcggccgtggacgatttatcgtcctacccgtacatcgggttcgacacggaaaccaaaccggcattcaagaaaggggtaacacatcaggtaggcctgttacaactggccaccgacaaacgggtatacttattccgattgaacaaatgcggcctgtccgaatcgttacaggatcttttggccaatgaaaatataatgaaaatcggtgtcgggatacgcgatgacatccggggacttaggaaactagccaatttcatcccggcaagctttctggatttacaaatatttgccaaggcattcggcatagaagagatgtcattctctaaattaatgtcgattattttcaaggtgaaaatatccaaacgacaacggacgtcaaactgggaagccccacgattgacccccgcacaattacactacgcggcaaccgacgcgtggggggcgctaaaaatgtacaaggcgttaaaatccggcaatagccaactacaacaagtgtcctagagtttgtaaagtaatactttataaactctctcccacgggcacggaaaaataaaacgtggtaccttttccctctttcgattcgaaccataatttcccatgattcattctcacgaaatccttgcagagttgtaaccccaacccgctccctttctctttctgcgtcccgtaagaaataaaatgtaatccatcatccagcaagccttgttgatgttcctcactgattccctgccctctatccttcacgattaccgtcaaaaaagcgttttcttccctgcaatccacatcaatccttccccccgtgtaactgaatttaatcgcattggataataaattacgcaacacggtcttcatcatgttcacgtccgcgtacccggtaaaaggccgatcaatatgattgcaaatttttattcccttcgcctctgcaatattctcctgcaacacgatcacttctttcgccgcctccgtgaaagaaaatgcctgcctgtacggctgtaataatccattccggctattactccatagcaacaggttttccagcaacaggaaagcctcatccgtggtctcctgcaacatcttgataagattctttatattatcatccggaattttctccttctggtgatcaagcgcttcaagaatcattttaagtgtacctatcggggctcgcaaatcatgagcgataacggaatatagcttgtctttagaacgggatacgctttggatacgttcattctgcctctcgatgatacgttgtgattccagtaaaagcaattgattgtttattcgcaggatcaactcccttttactcaacggacgggaaacaaactccaccccctcgtaatcaactactttccgaaaatcttcgtaacgattggggatcgtcatgtaaagaatcgggatctgtttggtcagggcgctctgtttcaactggcgaaccacggtaaccccctttccttcctctaaagctaggcgaataataatcatatccggcaacctcaacttcgcgagtagaaacacctcgtccgcttccagagtaggtaataatttaaaattctctccagccagcaggcttttcatcttttccaaattcgaaacagaatcgtcagccaaaaggattgtatattcactatgatctatatgcattcactacaaatttataaccaatttttgataaaagttcctcgtagagccgattaaatgccatagccttttgacttaaatcatcaaatgattcattattaccaatttcgttctctcccgacaaattatttttgatcgatttccacatcgggtacatggtttcggagaaagtttgcaattcagttttcaacaatgccaattcacgctccatctctttaaaacgagtcacgtcatgtccgatcaagtgaatttcggcgtgatctcgatctaacctaaccgagtaagcatgccactcgataaataccacctcgtcaccatgcatcaccttggcattaaacgtcaacaaatcctccgggaacttcaccacttcctccaatttctttgatgaaatatccatttcagtcattagatccccgatccgactcccgataatatcatccggactatccccgaacaaggaataaaacgtcttgttcgagaaactgacatgtaaatgccggttcaggcgaagaatgtaatccacccggttttcgataaagtcctgatacaaggcatgatgtttcaccaattttcttaaaatcagttctttctccaacgctccggatagcacggaggccacctgtaccaaaaacgcaatctcttcccccgaccacgattcctcgtggtgacagcggctcaagcacaaaaaggaaaaaagatgactggatatatacaagggtaaaaatatagcgcaatttacccccatcacctgcatgatattcttcagactttcgttcgtcacgtcatttatatcccgaatatatatataattatctctctctaaatcctgctccaacttcctgtcataatagaaactgcgcttctctccagactccggaaaaactgactccccggtactagtccattcttccgatatggtaaacgtcatatcgtgattaatactcacgatataaacctgatcggcacgctcgtgttctcccagtttctttaatgccagcttcacgtttctattcaaacccacgctcgtggataataaaacgtttaaatcagataaaaattccgctcctgttatgttattttctgtctgcatacgcttgtttggatcgtttagtcctcaatatttgtttctttttctagtatttatacacgaaattcacacttcaggttacatgattctacatttttatat

SEQ ID NO: 418 - DNA, 4096 bp, Butyricimonas faecihominis
agatagaagtatggctattgcagttaatgattcaaatttcgaggaagttgtgctaaaagcagaagttcctgttcttgtagatttctgggcagaatggtgtggaccatgtaaaatgatgttacccatcgtggaagagatctctaaagagttcgaaggtaagttagtggttgctaaagtgaacgtggatgaaggttctgctgctgctaagtatggtattcgtaacatcccgacaattcttttctttaagaatggcgaggttgctgacaaacaagtaggtgcagtacctaagacgactttggtttctaaaatcaatgcactgctttaaaatattaaaccgccgatcggcggttttttttgtttgaatttccacttgtaatttgcaaagccgtaagcttaacttgtagctcgtaacgggaatgtccaaaagtcatttttcaaactccctccccccttcggggtactccctctatgaacagagggagagctgaaatactccctatattctgggagagacaccagctcctcctctgtttatagaggaggtggctgcgaagcagacggaggagttttttgaaataaaatgacttttgggatagcttctaataaagaatgtacccggccactcctgccgctatgatcatgagtatcgggtccattttgaatttgaaggtggcgatgaaggctatggcgaagattatatagcttttgtagtccacgaagttttgtttgttcatcaataacaacgctgctgccccgataagtcctaaaacagtgatttttaaaccttgcatggccatttccacgtatttgttgtcccggaacatgaaaaagaacttggagatcgtgatcatgatgatcagggagggaagactgacggctattgtgcagatggctgatccccagatgctacctgttgccgtgtagccgatgtaggtggcggtgttgaaggcgatggggccgggcgtgctttgcgaaatggccacgatgtccgtgaagtcggccacgctgatccagttgtgggtttccacgacgtcatgttgtatcaacgagagcatggcgtaaccgcccccgaaaccgaatagaccgattttgaagaaggtgatgaagaggctgatatagagatcaagttctgacatgttaattgaaaattgagaattgaaaattgaaaatggagaacggactttgtttcatgacatttttagagtttgtgggtgatcttgccgtagagcaagccacctaggatggcggcgatgatgatatatatgggcgagaggttgagtaaccagacgaggagggcggcaacgaccgggaaaatgatggttttacgggtaacacctgctgatttacccattttgtataaaggagcggcgatgagggccacgactgccgggcggatgcctttgaatactcgttctactccggggttgtttttgaaatccgtgaaaatgatggcgattaacaggattacgatgaaagaggggaggatggttccgaggctggaaaaaatgacccctttaattcctcgtgccttgtaacccacgaaaatggccgtgttcagtgcaatcggtccgggggcggattgggctattgccatcatctccacgaattcgctctcttttagccaaccttttttatccacgacttcttgttggatgagtggtatcatcgcgtaaccacctcctagcgtgaaagaaccgatcttgaaaaacgagataaatatttgccagtatgaagccataattttgcgttatatatcagtggcaaagatacgatttcccgactaaaattcttaatattgtagtgttgaaaacagtgcagatgcgttaaaaccttgttgatttttggaatgagagttcaagcctttgtacaggctctggtgaagaatatacgaacttgatgattcatgtatgaaaaaaagtacgaaaagaaagataattgttgttttgggcctgtttgtggtagtcggcctgatcgtgtggttcgggattttccgaaaggtggggaggtttgatactttgcaggcggtacccgtggatgcggtctttaaggtgaatattgtgtctgtaaatagcgtgcatgaacggttgcaccggaattttatttggaaatcgttgaaaaattatccctatttcgaggagtatcattcgaatttgcaatacgtggattccttggcgaatacctatcctaaattaaaaaggatattaactgatcgtccggtaacaatttcatgtcatcaggtggggttgaacaaatacgatttcctgtacgtttgtgatttggggaaattgaatgtgattcaggtgtttgaaacgttactgctgaaattggtgcaggatgacgagataaaaataaagacgatcaaggactcgaacggggagatccgggagattcgctgggctgactggcgattctttttcacgattaaggataatctgctgatcggttcatcgtctcatgctctggtggctcgttctctggctcggtgtaagacgaacaaggaggtgcaggaagtggtggtttcgggggatataatgcttgatcttgatcatcggcagttgggaaaatgggttacttcggtcatggaggcatcggcggtggcagatgaattttcattgttgaaaaatacccgtttgatgatgcagttgaatgataaatctcttcgttttgttggggaaacgaggcccgatcctaataagtattctttgttggatgtagttagtttcttggaaggtggttcttctaacctagagacgatcgcaggtgaaaatacggcagcttatgtttctttttgttttccttctttcaaggatgcggaaaatttgctgttggagaattacaaggtgaatagcctgcaatcttacacggaaatgaagaaatcactggatcggttgaataaatttctgaatatggacgtgctggaggtgtttacatcttggattggtggggaggtggcaattatcaaaccccgtttggagaacgatcagaaggcggatcatatcgtgctggcgatacgggcaaaagagattcatctggccaaggatcaaatggcttatctggccgaacagattcaatggaggactcctatccgggagagggcgatggagtttaacggacacacgattcattatttccggttaaaaggttttttccagcttttcttcggggggatgttcgaacggtttgaacgaccttattatacatttttgggtgattatgtcgtttttagtaattctcctgccacactcgccgagatgattaaagagtacgtgctgggaaacacattggagaatgacgagaaacatatgcgtttaaaagggcagttgggaagtcggaagaacgtgttcggttacgtgcagacacccaatacgtacgagtatttatatgattctttcaaggcgggttcccaagaaagtttggagaagaacagaggggcatttctgagttttgaaacgatcggtttctcgttatctaaggagggaggaatttttgagactcaaattatagcaaattataatgataaggctcccgaagagtacaagatgcgagagttgaatcgtcagtttgagaatcagataaacaagatcgaggcaggtttttattatcccgtgattcccgatagtattgcggtgagtaatcaagagtattacgagtacaagtcggaacaggccatttttaaaggggcactgaaggatggagagccggatggcgtgtggtgcgtgtttaatgttgcgggaaagttgctcggacaattcccgtatggcgacggaaagatagacgggattgctccgtttttttacgagaacggggatttgttggctcaagtgacttataaaaacgggctgattgcgggatataaggagtttttcccggacgggacgcttcgtacggagatcgcatatcggaaaggattacgacacggcacggcaaagttttattataataccgggcatttgttttgtgaaggacgttacaagaacgggcgacagaccggaaaatggcggtattataaagtaacgggggaaaaactttattaattttagattttaaattttagattgaaaaatttaatgatttcgtggttaagaaatcgtaggag

SEQ ID NO: 419 - DNA, 4095 bp, Butyricimonas faecihominis
tatttgaatattccctctcgtaattgtatcatttcttgtttgttagaacatcggtaattggtatataaacccgacttccaatctttgcgtgttgtatcctttttgagcgacacgatcagtaaatttgtaagaacgtcccacgaaggtacagaagaaatgcaggttgctgtcttctaacgggtagtattcgataccggccaagtaaccgtaagaagtacgatagtttcctttttcgatgtcaccacgtgtttttgacacggaggccgtttcatacattcccttcacgaaagcattccatttcggttggaaacggtagtttacttttgtcaccacggataggtattctgcatcaagtgcattgtgaccgtcaagaagagcggcatctttgttttctagcataccggtaatgataccttttcggtcgatttgttcgtcagaatacatgaagtctacaaacatatttacttttttagagaacgtgaaatcgttacctaaagcataataatacatttgcttatcttttgtttcggacatcacggatgctgaccaacgagttttatagattccatcgaacaagttaccattccagtttaacgtgtacaagagtggggcacggcttttttcaaatccgggaccgtatgtttcatcctgagaaccgttacggctatccaaaatttggaattgaagttgatggttgtcacaaatctggtaagcgatgttcaaaccggtcatgaagttactcatgttctcgatcatatcgctatattcgtagatttcgatcgggttcaagtcgaattcgataccaccataagcggcacattgttttccggcaaagaatgagaactggtcatttaattttaccccaatacctgcgatgtcaatggaagtaggcatgttgtcgatattgttaccaccgttgttcccacggttcagacgttgtctccagcgataggacaaccaaggggtgatgttaccttttgcttcaatacggaattgacgcatcttgaatgcagcctcgctcagtccgctttggtcatagttgaaactggcatcaaaagaaccttgcatgttcaaatagaagttgaaccagtccatttttttctctatttgggttactcgttcgaaaagagtcttttcgttcgtggcattttgtgcgaaagcacctgctgcgcaacccataacaagtattaataaagctaattttttcatgttctgtgttttgataaaaatataatttcctaatggggtgtgtcaaaatgtattttattcctcaaaaaactcctccgtcacttcgtgccacctcctctataaacagaggaggagctggtgactcttcccgaaaaaagggagtatttcaactctccctctgtttatagagggagtaccccgagaggggggagggagtttgaaaaatgctttttgatacatttattcctaattctgactaccccctctaactcccccttgcacagggggagaacacgcatttgcgttatatcgaggcggttccccccgtgagaggagggaccggagatcgtttatgcattaatattcgttgaaatattgttggatctgtttccaatcgttagtcttagtcaaagctaacatcaagaggattcttgatttttgtgggttcaattcttgagaagcgatgaatttgtattgattgtcatctacttcagcgtcaagcgtggtcggtcctgtcggcacacgggtggaacgtacgataagaattcccttgttacgtgcgttgattaattccgggaacacgtttttgtggatgtttccgttacctaatccggcgtggataattcccttgtaaccgctattagccatcattttaacaacgtcaccttccatgtttgaatagctgtacacgatgcccactttcggaagagagttcaagttcgtcacatcaaatatggattgactggtgtgtttttttaacggagattgattgtagaatactttgccgttgtaaacatagccaagggctcctgaattcggtgcttggaatgtttgaacatcaatcgtgttcatttttaaaacactgtgagctccgagaataataccattcatggaaactaaaactcctttacccatggattcttttgctcctgcaacaacgacggcattgtataagtttaacggaccgtcagcgctaagagcggtagagggacgcatggcacctacaagtacaaccggtttgttacttttcacgacaagattcaagaaataggcggtttcttccatcgtgtcggttccgtgggtgatcacgattccgtcaatgtcttttcttgccaataatttgttgattgttttggcaagtgtcaaccacacgtcatccgtcatatcctgtgaaccgatcttaacgatttgttctccggttacattggctattttctgaatttcgggtacagccgataaaagtgtaccgatggcaacctgtccggctgtgtaattggtcccggttgaagaagctccggttccggcgatcgtacctcctgttgccagaatatggatgttaggcaacttttgtgcgaacgtggtcgcaacagagaatagcactagggctaccagcaaacttaaattcttaaacattttcataacctgtaatttaaaatttacttataattagagtatttaaaaaatctgtataaagagcagtccaagtccaacggccacgatggtcgcgacaagtccgggcatcatgaacgagtggttcagcacgtatttgccgattcgagttgtacccgttcggtcgaagttaatggcggctaccacggtggggtagttcgggataaagaaatacccgttgacggccgggaacatggcgatcagcatgtaaggcgatattcccaaggctatgccgagaggcatgagcgcccggacggtagcggcttggctgtacaacaagatagacatcacgaacagggctataccgaacaaccagggcatttgtctaacgacttcttcgatagaagattttaattctgccatgttgccttgcaagaaagtatctcccatccaggcgattccgaagatggctactaccgcttgcataccggccccgaagacggaaccttgtgcggcttttaacccgtctgtacgagttattaataatatgatagctgccgcggataacattaatatttcaatgatagatggcatatctaataatacttgttcgccattgatcatgaatgaaggacgcatggtatcaaacgaaccgaatagcacgataaataccgtggcgataatgaaaacaaaaacagacaggcttgctcttctctggttggcaacgtctttcagttcgtatttcttgtcattgaacacgccttctttcaaacgtttttgatattccgggtcatcaacgagttctttcccgactttcatggagaagaaggcaccgacgagtacaccgattagcgtggcgggaatcgtgatcttcaaaatgtcaaacaaactaatgtcaaaaccggctagcaagcccagtaatgctaccgtggcagcagaaattggactggcggtaatggcttgttgggaagcgatcacggcaattcccaggggacgttccgggcgaatcttggtttccgtggcaacttcagcgatcaccggaagtacggaataggcaacgtggccggtaccagcgataaacgtgaatgcgtaagttactaacgggcttagaattgtgacgtgtgccggattctttcttaataagcgttcggccaccttaaccataagatccaatcctccggctgcctgcatacatgctgccgcggatataaccgccacgatcataagcataacatcaataggcggggccgtgggttgcaagccgaacacgaatgtcagaattcccaatccaatacctcccatgacacccagtccgataccacctagacgcgctccgatgatgattgctgttaaaacgaaagctagttgtaaaatcatctcatctatttatttaaagttttatttttcaatcattatcaagtcttacacgatatatcctacggtaatcacgaaatgaatgtttcacttttcgcaaaataaatgaaacttgttgttattaatttaaaatctgtataaatg

SEQ ID NO: 420 - DNA, 4069 bp, Butyricimonas faecihominis
ccttttatatattcgtacataaaaattgaaaattgaaaattgaaaattgaaaatgacaaggcatttcaattttcaattctatgtttatactactagcggaaaccgataagtttacgcacttctttcatcgtggctaccgcactagcccttgctttctcggccccggccgcagcaaccttatccagattatccgggttagcagcgtactccatgattcgctcccgaatcggagagcagaaattaataatatcttccgccaactgttttttcaaatctccgtaacgaatttcacaattattatacttctcgttgaaataatcatacgtgtctttcgaagaaacgacatccatcaaggtaaataaattctggatcacctccggtttcacgctgttcggctcggttggcccgctatcggttacggctttcatcacctttttacgtattgttgcagcatcgtcaaccagataaatagcatttccctctgattttcccatcttcccggaaccatccaaccccggaatcttgattccttctcccgtgtaggagaaagatgccggttccgggaacaactcactcccgtatatggtattaaatctccgggcaaatttccgggccatctccatgttttgctcctgatcttttccgacaggcactttatgagccctgtgtataataatatctgcggccatcaacgtgggataggtcaacaaacctgcattcacgttatccggctgtttacgagccttttccttaaaagtagtcgtacgctccaactcgccaagataagcattcatgtttaaatacaaatacaactcggcaatctcctttatatcactttgcacgtaaattgtcgccttctctggattcaaaccacaagcgaggtactccgccagaatcttccgcacgttctccaccacgttacccgggtgcggatgcgtcgttaacgagtgccaatcggcaataaaaaagaaacatttatactcgtcctgcatttttagaaaattcttcaccgcaccaaaataatttcccaggtgcaaattacccgtaggcctaattccacttactactgtctccattgtctgaaatttacgaatttaaaacatacaaagatacggttttattcgttttgtacaactatgtatcaaaatgccccggaaacaatattcatcatcacacgatataaccacctacccatgaaccagtaaaattcatttttattgtacttggcgaaaacaaccgtctctcgtttaccttatccacatcaacacaatgattaccagtacattacacctattttaaacaaatacacgctttttaaaacgttttcagtaaagtaagatattgatagacaaggagaaaaaaatattacaaaaatggatgttgttatattatttttcctacttttgaaacgcaaagtctaattaataattttaatttaaacatggaaggttacgaaaagaatgacggtatggaaatgaatgatcgggatgagatctattcaaaaccggtgagagcagggaaaaggacttatttttttgatgtaaaagctactcgtaataacgattactatctaacgattactgaaagcaaaaagaaactcgaaaaagatggttctcagaattacgaaaagcacaagatctttttatacaaagaagactttgataaatttgcagaggggcttgacaacgctgtcgcttacatcaaagcagctcttaacggagaaacaatggcagtccaagaagaagttgaaacaaacaaatttgacgacattgattttgatgatctatccaaataaccaaaaaagctcttcgcgatgaagagcttttttattatcgtatatatccgtaaggaatttttgccagaccttctgccagttgattgattcccttttccagtttccccttcagcaacattttcatcatcatgttcaactccgcctctgccgttattcgtaaccgggtatcataagggccgttatccaacagctgaatccatacttgaaattcaaaaggcaaacgtccatccccctccagtttaatcaatttcggttcttctctctccacgattttcattcccatttcaccaacaccttttaccataaaagtgcaggtatcttccgtggtgcgaacgtcctcgatcttgtctgccagttccggcatttgattaccggcccccatctggcgagccgtctcgatcaatttcccgatcttcgagaaatcagaaagaaacgcgtacacgtctgcaatcgcactatttattttctgaacgtcactaacaactcgtgttgccataccttttatttataagattctgggctcagacgccactccttcaacttggccacatcgctctcctgcacgtacccggtcttctgggccaggtcaatcatggcgttgtagtcactcaacgtatccagtacgcaatgagcattcgtgaaattatctatcgctttctggaatccataggtgaaaatagccaccattcccaacacgtcacatcctgcatttctcaacgcctccacggcctgcaagctggatcccccggtagagatcagatcctccaccacgaccactttttgaccttctttatattcaccttcaatcagattttccaacccgtgattcttggcagcagaacgcacgtacacgaacggcaaccccaattcctgtgcaaccaaagcaccttgggcaatagcaccggtagccaccccggcgatcaattccacctgtgggtattttgttttaatcaaattcacgaactggtcccgaatatacgtacgtacttccgggtaagacaacgtcttccgattatcgcaataaatgggtgatttccacccggaagcccatgtaaaagggtgattcggttctaattttatcgctttgatctgtagcaaatgtgacgctacttgttctgcaacagtgttcatatctgtctattattttaatggttattctttactttcagggtgcaaaggtacaaagtatttttcaaaagccattcggatagcatactgaatctcgggatattctccttccagcttgccggattcaaacaacgtgctaattccctgcaaaccgggaacaatcgaatcaataaaatgaggttttccctcgtgcagaccgcgtaatccaaacgcacccatagcctgtaacaaacgcaccagcacgaaatgataatatatttcccggaacttttccgcgaatcccggctcgctctccgtcaattcccggatatagaaatctaataattcttccttttgactttcaggaattttcactatcgcatcatataataaggacgccacgtcatagtgcaaagccccttgccttcctccctggtaatcgataaaatacacctcgttatcaaggaccatgatatttctggactggaaatcccggaacatgaaaccatccgtcccggccatgaccagcttcgctgtcaatcgatcaaaatcattctccagccgatcctcgtcgacctccactcccgccaatttcaaaaaacaatatttaaaatagttcaaatcccaccggatacaacgttcatcaaaaacaggacgaggcagacatcccgaataatccagtccctttcctccctccaactggaatttcaacaactcggacaaggctttccgatacaattccatggtatgctcgctcaggaattcaccctctcgctcccgctccacgacatccaacaacatatccggccccagatcatcctgtaaataacaaaacccgtcctccgaaacacaatacacgtgcggaacatgcaaacgggatttttcaaaatgccgtgtaaaatccacgaacaaacgattttcccgcaaattctcgtggtacacacccacgtatgtccggtctcccgtgaacacccggtaatatctccgggccgaaccggacaccggcaacggctccactcgccgtacatcactaccactatattgtttgaaaagagtttttattttttcttccataactctgattattcattctctctcgtttctttttccgacaatccaacacgtatttatatcattccgagtaacgtcgatcagccatattaagca

SEQ ID NO: 421 - DNA, 4038 bp, Butyricimonas faecihominis
gttgtatatggagtggcttgttttattcatgctgatcttgataggttttgtcctgttaatacttgagtttcttgttttcccgggagtgaacgtggcggggattttaggttttgcttgcgtgggaatcgctatttatatcgcttattctacgatgggaacgacggtcgggcatttcactttgttggggacggctctttgtggtttcggagtgacttattacgtcttgcgatcgaagacgtggaaacgtatgcagttacacacgcagattgatagcacggtggaaggtgtggatgaatccattcgggaaggagatgttgggatgacgcagggacgcttggcgccgatgggaaaagtacgggtgggggacagtgtggtcgaggcggaatcccgttccgggtatatcgaagaaaaccgggaagtcgtcgtgttgaaagtgtataaaaataagatagtagttaaattaaaaactgaatagaagatggagagtagtttgttttttctggtagcggttatcgccggaggtctttttttactttggatgatcctctactttattccgatcggcttgtggtttcaagcgttagtgtctgatgtgaaaatatctttgttgcaattggttttgatgcgttggcggaaagtgcctcccacggttatcgttcgtgccatgatcgaggggaaaaaggcaggcttggagctttatcgtgacttactggaggctcattatctggcggggggacacgtggctcaagtggtacatgccttggtgtccgcatctaaagcgaatatcgacttgacgtttcaaattgcaacggccgtggacttggccggtcgtgacgtgttcgaggccgtacagatgagtgtcaacccgaaagtgattaataccccgccggtggctgccgttgctaaagatggtattcagttgatagctaaagcccgggttacggtgcgggctaatatccgtcagttagtcgggggcgccggggaggaaactattctggctcgtgtcggggaaggtatagtgtcttcaatcggttctgcagcctcgcacaaggaggttttggagaatccggattctatttcgaaggtggtgttgaacaagggattggattccggtactgcttttgaaattttgtctattgatattgcagatattgatattggtaagaatatcggggctgaattacagaccgatcaggctgaggctgatttgaaaatcgcccaagcgaaagcggaggaacgccgtgcgatggctgtcgctaccgagcatgaaatgaaagcgcttgcacaggaaatgcgggcgagagtgatcgaggctgaggcagaagttcctcgtgccatggcagaggctttccgtagcggtaatttgggtatcatggattactacaaaatgaagaatattgaggctgatacgcaaatgagagaatccattgccaagccgaatgataagaagaataaccaaaaatagtgaatggacttgaaaatgtgcaagagacttagaattcagccccataaatgaaattaaacgtaagtaaggatttttgcagaaaggatgggatgggtgttatgttgtatgatttcaaaatctgcttggttatctttaagaaatagagagagttgtgagatagttagcataaaagttgtttttattgtgacaagtaaaggtaataaatatcacttgaatccgtatctttgtaggaaagaaggtaaaaatggtattgaaaaaacggcgagatcatatttcaacagacagcccttcccggatgaaagctcctaaatggtggcgagtggtgaggcgtgtgttcttttatggtattattttacctgtattcgtgtgttgtttgggaatattattttgtaattatcggatttccaaatacggtgaaggaaaagtctttggagatacagcattcattccttataataaagttggtttgttattgggtacttctccccgggtgaaaggcgggaaaaccaatccttattttaagaatcgtattgatgcggcagcggagttgttcgagtcgggtaaaattaaatatatattgattagtggagataaccgccgccataattataatgaacctcaggccatgaaagattctttggtgaatagaggcatcccgaaagaatcattggtgctggattttgccggattgcgaacgcttgattctatggtacgttcgaaagaggttttcggacaggatagcgtgacggttatttctcagcaatttcacaatgaacgggcgatctatctggctcgtcactacgggatacatgctatcgggtataatgctaaagacgtgagcgcttacgagggactaaagacacgaatgcgggaattgttggcccgggtaaaagtatttgtcgatttttttatcaacaaacaacctcgtcatttaggcgagaagattgaaattccgggatagactattccgtttcttgttcgaattttttaatcaaggagaataaatcttcccggtttgaggtcaatttcccgtgaatatccactcttggaatcttgtcacttttaattccgatgataagatactgttcgtagtaggggtgattttaaaaagaaaatcacgatagattagtatcgtgattttccaaagctattataaaagtaattcaattatggatttattttacccatacattcaaaatctctccgataaacattttgtgcatggctttaccggcccattgttttcttagttccgggtcagaaataccgtcaatgttgatggtttgagaaaccattttgcggcactcgataatcatccaagcttccgagaatgccttgctaccggaaggagtggtgatcggggttaacccagcctcttttaccttatccttgtctttaccggaattatgcccgcaataattcagagcttcccggtaagtttccgtgtagaaagttaatgtataggtatcccctttatccatgatgtcataagtgtagcgtgcgggattgataaaacagaatgtcaccggtttgttgtacaggtttccgagacctccccagcttgccgtcatcgggttaaactgctggtcgtttccagccgtgattaacatccagtcctcggataacattttaataatatttcccggaatcttgtcgggagcgatacgcttgtagccttgtaaagcatctcccggggcggcagatatggtggcaacggtttgtacgggagcaacttgttgggtcgttgtggttgtcgttgtggctacgggggcattttgtgcgcctaaacttttttgcgccccttcgttcaaactttcaaccagatcaatggttttgattctgaattttgcaatccggttgatcagtttggtctgatctttattcatcgcctgcttgtcggtgatccattcttcggcagctagacgttccctgctatcttccgggtaaaggtaggtgatattggttacttccacgttgcatttaccgggagtgcaaacaaaattcatccggtagtttatttttgcccggtccagagaaaaagtcttatcagcaaaaacaatgtattcgtttccatagcaagcaatttgtccctcttccttgttcgaataggcaaccattccccaatttcctttatctgttttgaaacgggtattcgcccatgctaggatggcgtcaaaaatttgatctttagaaagattcggagcgttaatttcctgtgaaaaaacaacttttccgtttacttccggaacggctccgaccatgtatttgctttgatcttcttcctgggctaataccagcatgggaaaaaagcaaagaatgagtaataaattcttcatcatgatattcaaattaatgtgtgtttaaaactaaactaataaaagattgcacatcggctttctcgtggagaattatgccgcattcaaagttacagaaatatttcatacgttcttcggcttttaacgagaatttgcaagtgtggcatttttcctcaacttggtggggaaattcctcattttttactataatattcgttttgtatgattttgaaaaacatgaggttaatactttttatt

SEQ ID NO: 422 - DNA, 4008 bp, Butyricimonas faecihominis
cgaaaatctttatacataagctaagaaatctacccaatcccccttataataatgaaaaagacactatctttgttctgtctaaaaaagagacaagacttgtaggcaagccgatttaaatgtaaaaaactgaaaatcaatgcacctgcaaaaataaggcttttattttaagtttcatgatagagagaagaataagtattggaaacattgatcctattgacttttacggcattaacaacgcaaaattcattactttaaaagaatttttcccgaaattgaagatcaccgctaggggcgatgaaatcattattcagggagaagaaagcgacattgatgtccttgttgccaaaattaatgcccttttggaacattacaataaatataacatgctcacgatcgccaatctgaaaagaattattctggaagacgagatcgtggaagaccccgaggacccggcctcaattattgttttcgggaataacgggaaaattatacgagctagaacgacaaatcaacgtaaactcgttgatctggccaaaacaaacgacttgctttttgccacgggtccggccggctccggtaaaacctacacggcaatcgctcttgcggtaaaagcattacgcaataaagaggtcaaacggatcattctcagccgtccggcagtagaggcaggtgaaagtcttggattcctacccggggacatgaaagagaaagttgatccctatttgcaacccttgtacgatgctctttctgacatgattccctcgaaaaaattaagcgaatatctcgaaacggaaatcattcagattgcccctttagcatacatgaggggacgtacactcaatgatgcattcgtgattctcgatgaagcacagaacacgacaaaaaatcagttaaaaatgttcctaacccgtatgggtgtcaacgctaaattcgtgatcaccggggatatgagccaaatagaccttcccaaacgaagtgattctggattgattcatgccttcaaattactgcatcatataaaaggaattgcatttgtcgaattcgacaacagtgacatcgttcgccacaggttggtgaaagagattgttaacgcttacaacaacgaagaaaaaactaaataacggatctttaaagcaaataacatggaagcgattgtaaaaacaaatttcaaattcccgggacagaaagatgaatacgtcggtaaagtacgtgacgtgtataacatcaatgacgaatacctcgttatgttggtatccgacagaatttccgctttcgacgtggtactcccgaaaggaataccttacaaaggacaaatattgaatcaaattgccgctaaattcctagatgcaacgtcagacatcgttccgaactggaaaatagcaacacccgatccgatggtgaccgttggtcacaaatgcgaaccgttcaaagtagaaatggttattcgcggttacttggccggaagtgcatggagagaatacaaatcaggaaagagaaccctttgcggtttacctttgccggaaggaatggttgaaaaccagaaattcccgacacctcttgtaactcctaccaccaaagctatggaaggacacgatgaaaatatctctaaagaagaaatcatctcgtccggactggttagtaaagaagattacgaggccatcgaaaaatacactcttgccctattccaaagaggaacagagattgcagccaaaatgggattaattctagtagacacgaaatacgaattcggtaaaaaagatggaaagatctatttgatcgacgaaatccacaccccggattcttcccgttatttctatgccgacggttacgaagaacgcctagcaaaaggagaaagacagcgtcaactatccaaagaattcgttcgcgaatggttaatggaaaataacttccaaggaaaagaagggcaaactgttccggaaatgactccggaagtggtagccaacatcacgaatcgttatatcgaattatacgaacatatcacgggaacaaagttcgaaaaagccgacagcacgaacattcttgcccgcatcgagaacaatgtaaatgaatgcttggctagcctgaaataaatagtcaaaactttccaataaaggggctgtctcaaaagtcttatccagtatctataagctaccctctccagctccccctgtgtaagggggagttagagggggtagttgtttaaaattgaccttttgaccagcctctttatttattttctagctgatctaacagaccttcaacagcatcttccagtaagtccaacactaattcgaatccggaatccccgccataataaggatcgggaacgctatcccggtaggaaaaacgctggcagaaatcagtcatcttgaatattttattcttttcttcctcggatgtagccattctttgcagatcacggatattctggtcatccataccgataatcatgtcaaaatcagaaaaatctgcatccggataaaatttccgggataaactggtcagatcatatcctcttcttattgcgtgactttgcatccgacgatccgccggatcaccggaatgataaccactaatccctgcagaatcaatataatattgttcctccaatccccgatctttcacgtaatatttcataattgcctcggcactcggggagcggcatatattacccaaacatatgaacagaattcttttcttcatagctaaacattaaaaaacggttatcatgaccttgtttgccataataaccgctctcaaaaattatgttctattaattaaataaagagtctacaaactcttcacgattgaatacttgtaaatcatcaattttttcaccgataccaatgtatttcacgggaattttgaattgatcagagataccaattacaacgccaccttttgccgttccgtccagctttgtaatcgccaaagcatttacttccgtggccaaggtaaattgttttgcttgttcgtaagcattttgcccggtagaaccgtcaagtactaacaaaatttcatgtggggcatccggaatcactttttgcatgaccttcttgattttcgtcaattcgttcatcaagtttatcttattgtgtaaacgtcccgccgtgtcaataagcaccacatctgcattctccgctttcgctttactcagcgtatcaaaagccacagaagccggatctgcccccataccctgttttacgatcggtacccctactcgttccgcccagattaccaactgatctaccgcggcagctctaaaggtatctgcagcccctaaaacaacagattttccagcatctttaaatttgtgagccaatttaccaattgtcgttgtcttacccactccattcacaccgactaccatgatcacataagggccatgtccttccggtaaactcaaagcatcgtaatccgttgaattattctctttcaacaaatcaacaatctcttctttcaatacccggtttaattcatccgtacccacatatttatcccgctgtactctttcttcgattcgttcaatgatacgaagagttgtatcaactcccacatccgaagaaatcaacacttcttccaagttatccagaacctcgtcatcaaccttggatttaccaacaattgcccgagagagtttcttgaatacactttctttcgtcttttctaaacctttatcaaggctttcctttttctttttattaaatagaccgaataatgccatttccacataaattgattcagaacgctaaggtaggtaaaacaattgaaaattgaaaattgaaaatgaagaattgaaaatgaaagaaaataaaaaagagcgagtcacttgaactcgctctctcttctaaattcggcatcgacctactctcccacccaagggcagtaccatcggcgctaacgggcttaacttctctgttcgggatgggaagaggtggatcaccgtcgctatagacaccttttaatgcaattgaaaattgaaaatggagaatggaaaattatgatttc

SEQ ID NO: 423 - DNA, 3996 bp, Butyricimonas faecihominis
tatatatgttctctgatactgctttagatagaaattctttcttgatcagtggtatattcaaattttgtaaagaggtgctgatacatggttgggtagcaaaagtatagatatttgtgaatttctctacagctataagtgaggagggagaaattactatccgtacggatattggctattttaaataacaatctatgatcaacaataaaagccgatctctttttcttttcagttggatttgtatagtatcggagtttattgtttgttactcaatactttgctttacatctgttcgttatctattcgttatatcatcgttaaatctaggttctatagtaacggagacttaacgatgatataacgaaacgatgaagggacagatgtaagagtaagtgtgagggggaaagggagaacaggtgaaattaatatggtcggttttttataatttttgagaatcgggataatactttttcttcattgatgtgacttatatatggaggcggcttagggatatgatgtgtgtgtaaaaattaaaatgttgtattatgggtaagaacaatatttttatagaggcggaatacgaattcaagcgggtgcgtaggagtatcttgtttcgaatttttgcgattttggctcttttaggggctgtcgtatatcagtattcgttcctgtcaaggggagatggtagcggttcgataaatgatttgttacaattccacatggattggtcctctcaggctttggcttcatctatcccgtttaaaagtgcctattattttaatttgattcaactgttacttgttgtttctctcgtggtgaacgatttgagaaaatataaaataggtacgaaagaggctttatattctcatcctcagagtaaccgggaaatcgtgactggtaattttctagggaaattgttggtcgtgaccttattaaatgggcttgcatttgccgtttcgatagttattaatcttgttttgtattctcattcttttgatttgtcatattacttgttttattggattacactcacgtttccgacattagtttacttcctaggcttttccggtttcatgattcgttgggtgcgtaattcgggaatgagtcttattttgttagtgttgatatttagtgggttgacttttggtacggctcatttgttacatggattgttagatccttgtgctcgttatgtacccaatatgttttctgattttacgggacacgtaaatctagagagttatcttttacaaagagggagtgttttgttagctgggatcggtttttttcatattgtctgttatttcttatccaagaattccgaatggtcttttcgtgatgcggaaaagcttatggggggcttctgtcttgtttgttctttccggttgtttggcttttatgtattataatcattatagggtaatagataataatagaaagctttatcggcaagtatataatgaaaatagtacatattcaggaacgagaattgtgtgcaatgatttatacgtgaaaatgttggaagggggaggtcttacaataaaaagccaaatggagattacgaatggaaattcggaaaggatacctcttgtcatgtatttgaacccgggcttgaaggtaagtcgggttgaagtaaatggggaaaacgtattattcaggagagaatgtcaagcgattattttggataaagaattagctgccagtgagagatgtcgtgttgtggttctgtatgaagggaatattgaaacggatatatgtttcttggaacaagagaataaggaatatgatttctctaatgtgaatcgtctcggaatattttgttacgggtatacacctgctttttgtagtgaggattatactttattgaccccggaatgtatatggtatcccgtgtctgtacctccttatagcccgttggagtatagaaaagtgaattttacccgttattcgttgaccgttgagcatgaacctcgtctggtagtaatttcacaaggagatacggtggatgagaaagaggggaagacttcatttgtttttacacatgatatgccgggcataagtttgtgtgtcggtgaatatcggaaacgggaagtgaccgtggcctcaatgggggcagctgatacgactcgtttggaattgtattatttgcctcgccatgaatacttgttggaacaatatactatgcctgaagatcagttggtaaaagtgttgacagatagcaaggttaattttgagatgcaggggtgtataaagaaaagacagagtctgacagataaagaatgggaggaggtaaatgcgttggatgatggaacacggaacatgggggaattgattagggaagtgcttgctaaaagaaagttcgacccgacccagcattacccttatcgtcggttaacgcttttggaaactccatgtaatttttattgtttttctaatttgtctcgcttgacgggagagcgagaacaggcaggaatggtgttccttccggaaaaattatattcgatcgagaaatatcagaacaaggtgactgataaagaagatgattcggaaaaaatggtgaccaaattgaatgtagatattgccacgattttgggaagaggaagttgtagcataatacctacgttgtttggtcaaacgttgtttattgattccgaggaatatccgattctgcatgatgtattactaaatatgacacataaggatcgtgggggtggtataaccgtgactgatcattggcaagctgtacattatttgaaaaacaatagtttaaaggatgctttgcaggatcgtgctttgtcgccagaagtggttcgtggtatagttcttaagaaaagcgaagaattgttcacgtatctgatgttgaagattgagagtggtgaattttgtaaatttcatatggattccattgctagtacgcattttgcagaagtctcttgggctgtgtattgtcaaaagtttcaacaggcgtttggttttaggttggattctctcgtagaaaaatggtatcatgcgaaaggtttaccacaattggatatacgtgaatttcaggcgtttcatcttggaggaaaggatgttttttcttcgtctgatatattttgtcgttttaaagtatttaatcggagtgatgtgccgggacttatcatgacaatggatatgcaggggtggattattccacctcatgaagggagggaaattaaggttcgtaaccggaaaaacatgggacttattactaataattattctttgaatatgcctttagctgaaaattttccatgtgcaatgtctgttagattggaaaaaccggaaagagttcttggtgataccgtgactgggatttttaatttggattcgatgacatttttccaaaatacgaatgaaattatcgttgataacgaagatccctgttttaggataataaaggcgaaaggttttgatatcgtgtctttgtttcgaggcgaggaaggaccgcaagaatatcaaacaagagcgggggaaccggatacttggaagcctgttattgataataatttttacggtatgcctgtgcgaagtgctttttataaacgagccggttcgggtggatcacgtgtagaatggaatacagtattgtcacagccgggtgaatatgaggtgtttttttatcatacgaagcctgttaatacagcggtagatcctaaacaagaacttcattacacgatttgtaatggagaagaagaatataatgtgattgcaacagtagatagcaaagaggcgggatggatctcgttgggggtatttaatttcttaaaagaggcaaaagtcacattgagtgataaagatcgaaaggataagtttgagacaaaatacggttgtctgcctcaagagattgtggcagatgcagtaaaatgggttaaacaataggaggaataatcttgtttttggttaggctgctaaccagttgaccggtttgacagagaatgttacagagaaatatttattcctgtgggtaaagctgtaagt

SEQ ID NO: 424 - DNA, 3987 bp, Butyricimonas faecihominis
atttaaaattaattgattcccaatttcttccttatcgccttcgggatagcattcttgtgaaccataatatccattgtcttcaaagccatataaggataagatgtgtagaaataccctccgaatttgttatacttattccaagaattcttcacgatgaaataaggagttccgttctgatcttttgctttaccaatgatatgcattccgtgatcgtcagttgtcaggtaacgatcgaactcttcctgtctcatctcctgcgtgatcgtcttttcgggagccggaccttgcttgaaagcatccatcatctgctgtcccttcggcaacttttcccatttagcaatttccgcaccgctcatctccttcgtgtccgttgcggggatcacggcaacccctgcatccttcgtagcaaatcctttctcgctcacgtcagcaccccagacgaaagtataaccattatcaatagcataatccatcacttgcatcaactcttccaacggaagattataagccttatcccaagaccagttatcctcaacctcaatagcgaactccgtgtagaaaggatggtgcgtgaaagaggttaaattcacatagtcatccatgtttaaaccaaccacctctttagcgaaagtctgcggtgtatattcttttccttgatattcaaacttctccggctccggtccgagataagtatccagaatagcatcgaatccccgtttccacgccgtactcaaccgcttgttgttattttccactaccgcctgcacgtaagctttcaaaacagcatcaatctctccgaaaacatgactcggttccccgtaattcaatccttgatacacctcaagaggcacaatcccatatttctttgccatattcgtcacatccgaagaggctcctcccaccgcaaaattcaacaccccgtgcaagcgaacatatttatccgccttatccgaataagcgtgtttcacgaaatacatggccgacaaattcaccgaatctttccccattcgcatcatttccgactctaggaaagaggacgttgaccatgaccaacaagttccggcacgatactgatccttcacggaggtagcgggcaatctcttgatatcagtaaactggtagcctacaggctttgtcgtgtcctgtgccgtcgtattctgctgcgcatgggccatcatgtaccctccgaaaacgaaggcgaataaaataaatgctgttctcttcatatcttttatattgattgtgatttaattgtctgcctgcaaaagtataaaaagaaccgcaaaacaagctgacaagctgaatatatttacgttagccaataacaaaaagagaactgcctaaacagttctctctgttacaaaataaactcctccggccttcggccacctcctctataaacagaggaggagctggtgattcttcccgaagacagggagtatttcagctctccctctgtttataggggaaaatcggcgagtaagcgagaacagacagagagtttactcgttgtctgtcgagcgagagccgattcgagactgcttgcaggctcaataccccgaaggggggagggagtttgacatcctccttgacttctttcaaattccctttctttaattaaaaagtataagaaaccgatgcctgataattccggggtttcgccatgatcgtggtccgctcgaaatattccttgtcaaacaagttgttaacattcaatgccagtgttacgtgattcttgatcgtgtagaaaatacccgcatccatcaaccacaaggccggatcgtacaaccggttatctatattccggaacaccttatccttgaaatttccactcaaatggaatgacaaattctttagcaccccgcgtggtatcgtgtaatcggcataagcgtagaatgtcgtacgaggcacacccgtggcacgaacatttttattctgttccttatatttagagaaacgtccgctctcggcaatttcccgcaaacgatagtccgaccaaccgagacctcccgtaacttgtaaagtcggtaacggacgaacaaccacctcaatgtcaaaacctcgcgagtcggctcttccgacttgtccccggatactcttctccgtggccacgccatccaccaataccgtcgtgtctcccagactcttcacgatattatacttacgaatataaaacacgcttgcgtttatatccaccatctcgttcaaggtgtaacgtacaccgacttccgtggaataccccttttccggcttgaacacttcgcccccatcctcgtcaggattgaactcgttacccttgcggtccaaatacatcacggtaggactatatgtcgtggttacaggattgaaataagaagaaatagaaccgtagaatgacaattcaggcatagggaaatacacgacacccactcgatacgtgaatgccgaggtctccacctctttccattctttcctgttcttcgtttcatatttctgtttcccgtcatcaatcgtggcacttgatgttttccggctatacaaatccacacgcccggatgccatcattttccacttatcattaaattcgatcacgtcatgcaaataaattccatgcgttctctccgtgcgcagggaaacggctgaaactttcgtgtcccaccacccctgcacgatatgcggatcccgcacaggcaaaagtgcatccaagccgggcccccacaaatcgtcatctccataaccgttatactgggcgaaatcaaaacaattgtacgtccatcccaacgtgtagttatgcaacacggaacctgtctcgaacttcccggtcaactcgatcgtgttattcacgtttttatggtccgggttaaaattcaacgggttctgacgggcagcatttccccgttgaaccgtatccaagtcaacataaatcttctcggtctctgactttttataataccatttgtatatcgggtctttggaagtgcggtaagaaagcccctcaatacaatgataatccaaatcactgtggaaataggaaaaacgttctttcaacttcatccaatccgtgatctggtaaacgtatgacacagacatatcccatactttccgtttcatgtaattattggcaaagtcattataaacctcgcggtaatccgcctccgggtgacgatcccccttcagcgcgtacggtttgtctccgtccacgtagaacatatcaccgggcataacgggtgcagccccgatctcggtcgtgtaatcatcatcggcataactaccggtcacatcaatacgtccccactttcctaaatcagctcccaaaacaccatacacggaaaaacgatttgcattcacctcacgccatccgtcacccgttgaataattgatattggcacgatattcgagaggtcccacaagttttcccccgaaaccaagagtagctcgtctctcatcccagctaccataactgatacgagcgttggccgagaaatcgggagatgctttcttgcgcacgatattcaacacgccacccatagccgaatgtccggccaaaatagcagcgggacccttcaataactcgatagactccacggcagccaaatccccgtaaggtacgttattcttcaacgtccgctcatcgcgaatcccgtcaatcataacaaccgcactcccctgtccgcgaatggaaaactgttggaattgcccgtattgtttgtctttcgctacaatccccggcaaaaacttaacggcatccatcagatcgacaatccctttccggtcaagcatctgactagacaacttgctcaccgttatcggaacgaaacgtaaaggcacatccaatcccaacaaatcaatcctcttctttttctgcatcacatccacctgatcgatacggaataaagaatccgtgatactctttttctttcgcttgtcgttctcttgagcgagaagcgaaccgacacacacaaacagcaacaatgctaatacaacaacttttttcatacaactatatat

SEQ ID NO: 425 - DNA, 3970 bp, Butyricimonas faecihominis
atacattattttcttttaaccacaaactaatttattctattcatgggacttagaggtttcggtagtgacaatttttccggagtattaccggaagtatttaaagcactggaagaatcagccttcggacatcaacattcctacggggaagacaaatacacggaaaaagccatcgaagatttcaaacaaatattcggagatgatattgacgtgtatttcgtttataatggaacgggagccaatatattgagtctctcggctttcacgcattcctataacgcgatcatttgcgcagagacagctcatatcaacgtggacgagtgcggggctatcgagaaacaaaccggcagcaagttgctgaccgttcccacatttgacgggaaactctccctaggactgattcataatcacatgcatggatttgatgatcaacaccacgcccaaccgaagatcatctcgctaacgcagtgtactgaactcggaacagtctacacgcatgatgaattaaaagaaatctgtgacttcgcacacgcccacgatatgtatgttcacatggacggagcccgtctggcaaatgccgttgcatacttgggatgtaccccggccagcatcacgaaagaagtgggaatagacgttttaagcttcgggggaaccaaaaacggcatgatgttcggtgaagctgttgtcttctttaacaccacaatgtcgaaagaggtgaaatatatccgtaaacagttgatgcagctacattccaaatcgcgctttatcgccgcccagttctcggctgttctaaaagataatttatggttgaaatcagccgcacacgcaaatgccatggcacaaaagcttgctaacgcagcagagcagattccttctgtgagcatcacgcagaaggttgaggcaaacgagattttcgctatcatcccgcgagaaaaaattaccaaactccagaatgaatgtttcttttacgtgtgggatgaagatgcggccgaagtgagatgggtttgctcgtttgacaccacggaaaatgatgtcatcgaattcgccaacctactgcgtcaagaattatgttagaagatggatagagaaattattaccacggaagacggaagtactaccttgtatataccggaactaaatgaacattatcattctattcacggggccatacaggaatctattcatatatttataaaagcaggtattgaatactacggacagaagaatatccgggttctggaggccgggttcggaacgggactgaatgcttttctaacgttacttgaggcgagagataatgaacgtaaagtggtgtttcacacgttcgagaaatacccactgacacctcaagaagtggaacagattaattattctgacctcttcaccccggaagatgcacccctgtttcaacaattacatgacgcaccttgggaagaggatgttgtcatcaccccttatttcacgctccacaagcatcgggcagatttcgaagaagttaattttcacaaatattttgatatggtctttttcgatgctttcgcccccgacgtgcaacctcgcctatggacggaatcaatgctttccaagttttacaaagcacttaaaccggaaggaattctcacgacctattgcgtgaaggggactgtaaaacaagctcttcgtaatatcggtttcaaccttaaacgccttcccggtcctccggggaaacgggagatgttgagagcggtcaaataattttagattttagattccaaccgcacgggaccaacgctttttcaatcgtaaatcggaagtcataaatcgtaaattattcaaatgttttctaaggatttaaaacagttacttgacgaaaagtatttagaatacaataaatcggaattctttatagagaccgatccgattcagataccgaaatgtttcgaggaaaaagaagacatcgaaattgccggattcctagcggcatcgctagcatggggacagcggcccacgattatcaagaaatgcaaggagttgatgcaattaatggattatgccccccatgatttcgtgatgcaggcggaagatcaagactacgaacgtttctgcaatttcaagcaccgcacgtttaatagctacgattgtgtttactttttgaaatcgctagcaaatatttatcgccatcacgggggattagaaaccgttttcacacgggcctaccaaaagcatcaagatatgtttgaagttctaaaagagtggtattctgttttcacctctttacctgccgaggcaagagtactgcgacatatcgcgaacgtggagaagggttcagcagcgaagagagtaaatatgtttttgcgttggatggtgagacacgacggagaagtggatttcggcctgtggaaagaaattccaacctctgccctattgatcccgcttgacctgcacacgggtaacgtgagtcgtcaactgggcctccttacccgtaaccagaatgatcggaaagccgtggaagaacttactgcacgtctccgggaaatggaccctgttgatccaattcgctatgatttttcacttttcgggttgggggctttcgagaaatataaccgttctaatttttaaaacgtttcaggtccgctgacgtaaatctccattccggggtcagaatattacccattcttttgagggtgtaccacggggatttatcacgctctttcgggtttaccaatacttgaatatcctgtgcaggcatatagctttgggccaacaaatataacttttctcccgttgcgggattctctgccatatcgaccacgatgaccgcgtgcccgggtgaaccgccttgaataagtacgtccccgatctgcatggaagtcaccggtacggacgttaattccttcgccaaagataaagtcccggcataagcgaacaccacgtccagataggctctaaaagttttataagagtaatcttttgctttggatttataccaagaaactcgatttcctttcacgctgatccggtaaccttctgcccatttcgtgtaatcggcacggaatccattcgtgaaattaaagtgtatccggtcatacgctttatgcttatacaggtattccgcccgcaaacgaatcacggcatcggcacattgttgcaaatcccgcttaccgatctccatatccaccacggcacagtacacgctccggttccatttttcccggccatcaaaataatacactttagtcccgtgagaacgcaaaggaaggttcctcaggtattcaccaaaagaaccttccttcacgtttaccctcgcatatcccttgggaggaacaatccgggtacggatttcttttccatccgcccggagcaacgtgttctgccctatcccttgcaggcaacataacaaaacgatgcagagggtaatgcaatttttcatgttaatccagtaacattccagccgcaacttcttcagccacttttttggaagttaattgctccaaaatagccaaaccgaatttgaaagcgtatgccggacctttgcccgtgatcacattgccatcaaccaccacgccatgaggttgcatttcggcttctggtaaatattcttcaaatcccggatagcaagtcattgtatatcttttgttcatttttatcttactcaacaccaaagccggagctgcacaaatagccgccacgtaaccacctttgtcaaagtgtttttgaatcatttgcaccaatgccgtacaatctcccagattcttggctcccggcattccgcccggacaaatcaagaattctgcctcttcttctttcacgtcactcaacaaaagatcggccaccacaggaactccatgcgcacctgtaacctctttcttatcggaaatagaaaccgttttcacttcgatcgttccccgacgtaaaacatccactaccccgagagcttctacctcttcaaaaccatccgctaaaaataaaaatgactttctcataattcttgtag

SEQ ID NO: 426 - DNA, 3945 bp, Butyricimonas faecihominis
atataatgttcgtgcttttttaggtaaatccgaatttgtcattttataaaatacttttaaagaatccgaacagtggctgtttaaccaattatacactttagtactcaacaccattcccgcccaaaatttcaacgtgggttcatccatgtttttaatatccgctaatttacccacgggcgttgtttcaatcgattcctcaaagacccaagccgttttcccaccttttcttatcgtatctcccccataatcttctgttaacaaactatccaccaacaataaagattttatccgatatttcccagaaggcggcaaattcggaaacacccacttctctatcgtattgaccgcttttaacatcgctaccgtatctcgcgataaaacgaaacgaatatctcttgatacggaactataaagaagatatttttcacttacagtttcataaaatctcaccggttccccgttagcatcaatcccatcttccacgtatcccaacgtatcgttaacgaaaattgaaactcctgtttctttatatattttatggagtaaatgccccaactctcctggtctatccggcactgcaaaccagtcaacgacagtacttgcatccagtttaatgtcttcttcgttacaagaagtcaataacgtgaagacgcataaactatataataaataacttttccacatatcactattttttatgatccgttactccaattctctttccactcgctggggattatcaaccaaattaccttgattatacacgatctcgtaaccgggaatcggtaacacccacgccgggtcttcaccgtacggttttaacacgtaatccccttccaacttaccttttatgtcataagccgtatgtcttatagattttttctccgggtacttcggagacaccgcgtacctacgcagatcaaaccaacggtgagcctcaaaacaaagttcacggcgtcgttcatcccggataaatgaaaccaaatcttttccactcaaaccgtctatatcggggatgccaccttcaaaacgattgttcaacaacgttttaatcgtctgtatcgcctccgctttatccaacatggcttcggcttccgccttgttcaaatataactccgcacttcggatcacgaaacaatcgtacactttctcccctacttttgacatcttgtattgctcatctcctataacctcaaaaaaagcatctaatctcaagtcctttatttgttgctcttcaaaacggttatataaagaaatcaagtcttctgaaccaccaaaggtgcatatgcaaaaataagacatctgatcataaaaagtattggtcgcactatacccttgcgtaaagacgatttccggatttttattatccaacacgtatcgctctttctctcttccctgaaacgattttaaatccattaattccacaccctccaaagccaacgccttttgacattcatccaacgccaactgccattctcccatatacaaatacaccctgctcaataatatccgggcggcaagttcgttcactctatagatcgtaggttgtgtaacccccttcaacttatcggcagcgactttcaaatcctccacaataacacgataacactcctccattgaatttcttttataatactcatctactatgtcttctgtaagattcaatgggacacccatatcactagatgctgattctttcacgtaaggattcgcatagagattcgttaacaaatagtaataagcacctcgcaggaaacgagcctctccttccactctattccgagtctcaacagagtcatgggagaattttttcacgtgagcgataataacattcaagtacgctatatggctatacattttttcccaatccttatcctcccactcctcatctgtctttggattgatagtcaactgatcagaccagtcatagaaattcttataaggaaccatctcatttatgagatccgtaacaccgtcttttttaaatactgtcataatcacatcatcatccatcacgtgaatatagggatagtatccattaccgtaaatacttgccttcgcaaaaccctccggttgctccatatatccgtttccgataagaatctcgtctaaatcggcacaactttccgcataagccaaatcctgtgaaaattcttccaaaaatttcccacatgaattaaacaataacacacaaagtattaagattaaatatcttttcatctttttcattcattaaaatgtcacattcaaactaagactataagtcgggcgaacagatatgtttatcaactccgaagaaccgaattgagagggatcctgccctttcaattttttgctacatatggtaaatagatttgttccactcacactcaaataagctgacttcatgtacatcttctgacaaattctcttcgggacaacgtaacgcaatgacaagcttgtcaatttcaagtaatctcccgaaacgacacggacattggaattgtcatacatattccaaatcgttccggcaaattcgtacgacttgtcattccaccatggcgttcttgttctcttgtaactctctgcatccaacatcccgggaacattcgtgtatttctcatccccaggacgctgccaacgatgaacaaattcgcctctcatgttcatcaccggagccggtactgccgaattactacttccatacatttgtaacaaacgaacctttgcccccacgctataagccaaattgaaggacaacccccagtttctccagcccaaatagttactgatacttccctgtaaaaaaggttctctacaaccggaatgttccatcacctccatacaaacatcccccaacgtcatcaactcgtacgatttctggcgggtaatctcgttaccgttcttatccgtcccgactatctcgcctgcatccgtgccgtaaaaagtaggacgcccgtccttgggatccaaacccgtaaatttgtaagaataaaacgtgtttacgggacgcccggcaatttgaacccgaccgtccagataatccccgtatctgatttcatcctgcaaaacctcatctttggcttttattttatccaccaactgattcaacacggaaccgaagttcgggtttattcgccacacgaaaccgcgtttctccccgccagctccaagattctcgataggcgtaaaattaaaattaaactcaaacccctgattatttaaggtacccctattcaccgtataagtactaacaccattaattcttgaaaccgttttcgacataaacgcatccgtcgtgtgacgataataataactgaaattcccgactagcttgttattaaacaacgagtattccaactcgatgttataggttgacgtcttctcccattttaaatgcgggttcgggtaatacttaatggaagagtataattcgttaaacgcccaatgagtaccctttcgctgtataatcaacttcggagaatcttgagcagacatatttccttggtaaccaaacgacgcttttaatgctaaggtattaatccaccatttatcagacaacagattctcgtgcatattccatcgaccggaaacagaccatatcgggttcagtttttcattacttctatctccaaatttattacttccatcaatacgcatattcgcattaagaatatacgaatctttataagcataaaacaacgttcccactaatcctacttgacgggttaaattatgcgtcaaaactcccttggcggaagaattagtttttaaccaactatcataattaggaaatggcacgtatccccacgaatcaggtaaattcacatcatcaaaaagcatcccccgttccgggatatatccccttttcgttattgcaaaactagtataaagagttgaactcaactctccaataacagaagcttggaactgatgtctactttctttatccaaaaatttattaaa

SEQ ID NO: 427 - DNA, 3944 bp, Butyricimonas faecihominis
gaccaaatatgtatggccaatgccggaagaagagatcgaatttggaaacagaaataaagaaaatgagttatgaaaatatttaaatatgtaattcttggtgcgatattgatgaccctgttcgcctgcgagaatgagaaaaatactttcagcgataatccgtcaatttacattggaggtgataaagaacagaatgcaacggcagactccgttatcttctcgttcaaaaaatatgatgatgcggtacaatcttatgatttgaatctgatggtttatgtaaccggggtggtttctgatagagcgcgtacttttgttttagaagtgttggaggacggaacgaatgtttcttccaacgattacacgttgggagatatggagatccctgctggagcttattatgcgacgttgcctgtcacggtaaaacgtaaggtggagggtatggacctttctgaacaagtagcttcgttgactgttcgggtaaaggcaaatgagaattttgaggaaggaccggaagaaaatgctgtttataaatttgtttggtgtgattatttgattcaaccggcttggtggcagtctggttttacgaacgttgcaggtcctttcactcaagcacgttataaatttatcttggattattacggtgatgtggatttgttcgagttgggcatgattgatccgaattccggtcgttcggatgatgataataagttatatgcttttattgcagaattgatcgatttattgaacgagtacaatgctactcacgatgaaccttatatgaatgataacggggatccgctagaaatcggaacgggtttaacgaattaatcatgataggaggagttattatgaaaaaatatacatcgataaaagttattattctgttgtttgtcttcggactaacggcatgtttggatgacgagggaaattataattatgccgacctcggaaatttttacgtggatacggtggggatacaacatacgtatacgatcaagcaatttagttctttcgcgttgacacccaagtttatttatgatggggataaaagtgtactcaagtataaatgggaactctacaaatcggatgagccatatatagggccttcgtcatacggaaccggttattcacatgattatacacgtgatgactatccggattacacgatttcgaccgagagagaattggacgtgaagatcgaggcaataccgggtgcgtattatttggtatttacagctactgatacgacgagtggattgaaaaccacaatggattggcgattgacggtagagggtgtgattggttccgggttagctgtattatataaaaatgcagggagaagtgatattgatattgtgtactctccgctatttaatggttcgttaacagagacctcttataatcgtaatacttattctacggtaaatcccacccgcccgcttaccggagaaccaaaagaattggtgagtgcaatatatgcttcttatgatctttattatttatatatgacatccggggaggacgtggttcgtctttcgtcaatagatatgagtattgcagatgagtttgatggactttttgccgggaagattcctgctgttaaagatctgaacggaatttttgttcgtaactataatactttctttatcaataacggtgtggcttataaagcgaattcgggaggtttacagttaacgccgatggccatgaaaaatgatgattattatgcagtggccggaaatacaacttggcaagtgaattcgttgttttacgatggtctgcatcgtcggtttattttctccaaaatgtggagtgctgaaattgacccggttattaattcggctgcacattttgattttggtaacgtgggaaaggatttgattcattggtcaaacggttattggcaaagtgacaatcagataaattattgtttcttcaaaaatcccgttgacgacggcaaacgttatatgtatgtatttgttgcggataaatcgacagccagtgcctatacttctaagtgtgcgatggatataagtgcttgtccggacatcgctttggccaatagttttgcgacgggggaacgtggtccggttgttttttatgctactgacgctaacgtatatcgaatgaattacaatgtggatgacgcaacttcaagtgcaactgcagtttggactcctgctgccggggaagtgattacacgcatcgaatttttcaagaatgcaggtttgaatctggaaaatagtacaaaggataagtatttgcttgtggcaacttacaactcgtcgggtaaaggtaaaatttatgtgatcgagtcggatatttccagtggggtactcggtgcggagccggttgccgtgtatgaatttgacggtcgtattgccgattttgattttatagctcaataatcagctattgaaggttgcctaagaatttcttaggcgccttcattcataaatttaattcgtattgttatgaaaagtattgtattgacgatattatatatcgttttggctttgtgtgctatggctcagcggccgatgaatgaaaatcagaaaaaagcgttagaggctcaaaaagccggaggcgagacgttggctcgttttaaatcggaacttctttataagcttaaaggaaaagaggaaagtgtctattcggacgtggcacagtgtttctattatttgggaatggaggctacatttgattcaatacaaaatgtgattgtaaaaaaattccctcatggggttttagccagaaatcgctatttaaacacctatatctactcggaaatgaatccggagaaacaagaggtattattcaaaaaatggatgaaacgttttcctccggaaaaattgggagaaagtatcgtgtatgattatgcccggagtagcgtggcgggaacatacgcgagaaatggtaattggcaaaaggcaaaggagtatattgataggatcgttacgaagggatggttgggagaaccgtgttctgtggttgcgggtgctttaagtaaatgcggggatatggaacatgctcttatgttttacaagcttgccgtggataactgcgaacaattgcaaaaagagggtgataaggcaagttttgccatcgcgatgagaggttatccctcgtatttgtctaattatgcaacagcttgttacgaggcgggtttgcattcagaggcgttagcgactatggaaaaaatgcctccccatagacgtgataaatcttacgctttgttaatggcagaagccggacgaccgttggaatcatttttgtgtttagcggatatgatcaaagcgggacaggcagacgaagaagtgaaccataaaatagaggaactttatatacaactaaacggtagtgagaaagggtgtgatacttatatcggaagattgcggaaagctcgtgctgatcaacgaaacgaggaaatcattaagagtatgatttcccggtctgccccggatttcacattgcctgatgcggagggaaaggttgtaaaacttgcagacttgcgtggaaaagttgtcgtgttggatttttgggctacttggtgcggcccgtgtaagcgttcgttcccagcgatgcaaaagaccgtagagaaatatcgagatgatccgaatgtggtatttttgtttatccacacgtgggaaaaagagaacaatgcgactgaagaggccgtgaaatatttgaaagataacgattattcgtttcgtttgttgatggatttaaaagacccgaaaacgaaagcgaatgaagtcgtgaagagttatggcgtaaccgggattccttcaaaatttgtgatcgatccacaaggacaaatccggtttcacgtgactggggctgcagggagtgatgatgagatcgtggccgaattatctcaaatgatagagatggcacgtgaaaaaaagaattaaaagaaatagtgttttaaaatattagttatgaga

SEQ ID NO: 428 - DNA, 3942 bp, Butyricimonas faecihominis
atatttaatacgtatttgtataaaagaaataataatatttttttttattccgattaattttctacctttgttcaaactaataaaatgaattatggatagacctataaaagtttcagttgcttgccaaaaagggggtgccggaaaatcaacaataacgacattgttagcgaataagctgtattttgaacatgggaagaaggtaataattgtagattgtaattacccccaactttcgcttttgggattaagaacaatggaatctcagcgtttcaagaaaagtttagagaatgcgaaacaaaatgatgatacaaagatcgacaaagatctaagactttttttaagagtattagaggagtttccaaacttcatgaaagattttacaataacaacatatccaaaggaacctaattgcccggattatatggctctaaaaaatgtcaaagaaaaattaccacagtttgataatctgaatgctgatatagttttgttcgatacgatcggatctgcaagtgatccatatttgcttgaattgcttgtaaacaacgattatgttttcgtaccaatagaacctgaaacattagccgcaacgtcatccgtggcgttcattaaatcattgaatgccgtgaaaaccttaaataaagatgcaactttaaaaggactttatgcctttttcaataaagttgagattaaggtaaaatcacatatgcaaatgattaaagatgttgcaggtgtagctaagaaatttgatctggatattctaaaggataaaaagaataatgtcatgtttgttgaaaacaaaaaaattttccagaatgacatggttagatcaactataatacctaccgcgtatcataacaagctatttgcggaaacagcttgcaataaagccctagatgaaatgatcaatataattctatcaaaacagaagtgatatggcaacaataaaaaaaggcaaatcaaataaaaagatcaattttgaggatatagatcttgatgattcactacaaccaaccaatttcgaacagctagtaagtgaaggtagtgaacgcatttctgataatattgcaaaagaaaaagcgatttctcaagaagaagaaaaaacaatcattccggaagatgggggagaagagattgttcctggaacaaaagaggaagtgaaaaaggtagaggtggcaaaaaaagaagttgaaccaagagaagataatgttgaaactaaaaaggattttgtaacagagcccaaggcgaagacaaatcgtaaaggcaaacacaaatctgaagttagtaatcctatacttgcagcattacaagaaggaagcgttgcaatgcgcagtattcgcataaaagctgatcaccacgagaggatcatgaacctgaaaaaacaatatggtggtaacaatatcacacttcaaaaaatcataaatgcgataatggaagatgttcttacgagtgcagaatccattatatcgaaaaataagaaatagtgatcactgatgaaagacactgaattctataaagccctcatgggatcagaaaaagaaaaaaaaagaaaattagtctatatcgatacagaggttatggaggctttgaaacaaattaagaaaaaactcaattccagactttcactgtcggaattagccgagttatgcattgaacaatatattgacaaatatggaaataaataatctcatttctgctctacacaaaaaaaaagaacttaaaagtgcgcttcctatcagactagatttgattgcagaactaacggaacagaagaaagctgccaaagtatcactgggaggatttacttccaaaattcttgccttcatgatcgacgagattaatcaacatatagaaaaaaagaaatgactcttacgaataaagagtcatttctttcttttacattccccttcctcggttttcattttatccctcaaattcgtacaaatacatctttcacaaatgatcttcgcacgtttttttacacgaaaggcacttttgtattaaaaaaatatatatttttgccatagtcctaataaaaacgtatatgatattcgaggtgttatgcataacattgatcgtgtatattgttattcttgtgtcaatactagtattcaaaaaagatagtaatccatcggctaacattatcacgatcccagctccccaggaagacaatctttctagtgacgaagtgaattttgataacttcgattttgatcctttattcaaagaaatatgcaaataccttctgagttatccggaagaacctaaaaaaatcgtaaagtttatccgagaacacctaaacgagaaggaaagaaaagatttatacgcgtgtctgaaatacaataataaaaaactatataacacgataatctccctacaatcatgtaacctggaagatatatcaagctttgaaactactcaaatcgatattcaagccgataactttgtaacgatctccgaggatcaggagatctcggcacaaacaggaatccccattagctattttttcgagcaatgtgaaaaattaatcgaagattcaccgcaaatggaagtatattcattatttgctcaaatagacaaaaattttgaactattatcggataaggataaggaagatgttctcatactgccattaaccaccccgaaaaaatctaaaggaataacaaaaagcatgatgaataaagcaacacaaatagggaaggagatttcggaagaattttacaatgaacttattaaatgtcaagaaaataatcatgatgaaacagaataaacaacaaatactatgagataaattttattaattaatcagtcctaaaaaaatgaaacaacaatctaatttaacatggtcaagagccatggttttatgtgcattactatgcatcatcacgtcttctgcattcgcccagataaatgcagagcaaatactaacggaagttgacactcaacttagttccgtaacgagtatcatcaccaaaatttgttacactattgctggtatatgtttttttgttggagcaataacagtaggagtgaagttataccaagggaaccaaaatgtcgggaaagaaatcggtctttattttgcagcaatggctttttttggtattgctggatatctagttcaaaaattctttgaataatggaaatattcttcgttcacaaagggatcgaagaattaccgaaattttggaagatagaaggggtattattgctagtgatgctggcagtatcccttttatctttcacgcttatatcggtagttcctgggatgataggtaaactaatcatccttgtagtaaccataaccctgataattatcttccgctcgatatcacaaaaaacaggaataaaaggagtgaaaaaaaagatcggggcaaggaaacaaccagatattataatagtgacaaaaccgcatctacaccatgactcaaaagacattagatgatataaacccgtatatcgggtttgaaaacggatttttgatcggtagaaacggagaatatactttgggttttaaagttttatttccacctgtttttacaacggctccggaaataaagcaacagatattcaccgcttttgctgatggtataaatattctgccaaactacacaagaattcatcggcaagattttatcaattacgagaaagtagatttatctactttacactacaacaatttctttgaaaaagaatacatggaaacctattcaaacaaagaaatacaaaccattcattcttatatttactttaccataatcccaaaaaattttcacgatgccagcatcattaaattttctacatttgaaaaaatgtcattttcaaaaattccgaacaatgacctacaagactttcaagaaaaagtcagtcagtttatcaattacgttacagcaataaatattaacaatatacaaatcgtcaaatttttacctctcacgttaaacg

SEQ ID NO: 429 - DNA, 3932 bp, Butyricimonas faecihominis
aactaaaagtttgacaaatgaaaaggattttaattagtgtggttttagctgctatttgtttaagtagtttcggtcagaaacaagaagaaaagaagaaattccaaatcaagggacaaccgattgttactgttttcgcgaactatcatgccgggattggaaacgcaaataaagaatccggattcgcacttgatcgtgcttaccttgggtatcaattctccttgacagaaaaattaagcggaaaagttgtgtttgacatgggttccaccaaagtttcaggttccgacctcgaaagagtggcgtatataaagaatgccatgttaagctggaagacgggtaatttcacgctggacttcggtttgatcggtttggaacaattcaacgtacaggaaaaattctggggatatcgttatatcatgaaatccttccaagacgagtataaattcggttccagcgcagatatgggaatcttgggtaaatacaaatttacaaaatggctctctgccgacatcacgattagtaacggggaaggttacaaaaaattgaacggtgacaacaaatacaggtatgccgtgggagcaacaattcttcccgttaagaatttgactctgcgcgcttattacgatcttgccagtaagaacatcgaagaagacgagactaaagatcaacagaatttagccttcttcgctggttacaaacacgagttattctccatcggagctgaatataaccaaatgtataacaccaagttcaaggaagacaacgatcaatccggattctccgtttattctactatcaagctggaagatcaattcaatctcttcggaagatatgataacctaggttccaaagatgattggagcagtgctgacggacaacgaatcttagtaggtgttcaatatgccccgatcaaacaactaaaaatcgccccgaatttctccacttggaacccaagagacggtaaatcaagctctttcgtctatctgaacatcgaattcaagttgtaacattaatgtaacaaatgcgcaacattcgtgtaacaagattcatctaaacttgcagtgtaataaatgaatcagaagacgttgaaattaatactatcagaaatgaaaaatttattgatccttattttagctatcgctattgcatcttgcgggaactcgaagaagaacaaagagtccgagagcaaaaaaatgaacatcgctgcagccggagctactttccccttaccattctacaacttggcattcaagacctaccaagagaaaacgggtaacgccgtgacttacgggggtattggtagtggcggtggtatcagaagcctgaaagacaagattgttgatttcgggggatcggatgcctacctgtctgacgcggagatgcaagagatgccctacgcaacggtacacatcccgacttgtatgggagccgtggttatggcttacaatttaccggaagtgaaagaattaaaactttccggagaggtggttgccgacatctatctgggcaaaatcaccaaatggaatgatgctaaaattcaggaattaaatcccggagtaactcttccggacaaagaattaaccccggtataccgttcagatggtagcggtaccaccttcgttttcagtgattacttgacgaaagtaagcaatgattggaaagaaaacgtgggtacaggtaaatcattgaaatggccggcaggcttggcagctaaaggtaatcccggtgtagccggaacaatcagccaaacccccggagcgatcggatacgtgggatcagagtacgctttctccttgaatattccgatggcccaaatgaaaaacgcttccggcaacttcatcatgccgaatacagaaagtatttccgcagcagcaaaaggcgaaatgccggcagatacccgtaccatgatcacgaactcttccgcaccggacgcttaccccatcagttgtttcacatggattatcctttacaaggaacaagcctatgcaaacagaagcctagcacaagcacaggcaaccgtgaaattactcgattggatgttaagcccggaagcacaagcattgactacaaaagttcattactctccccttccccaatcagccgtggctaacgccaaaacactattaaactctataagtttcgagggcaaaaaagtcctgaattaataaagttacaagtttacaggttgcaagttgaatcttgccaacctgtaacttgtaacctgtaacttgtaactaactatgcgtgatcttatttttaaacggctactctctatttgttgtatcctgattctactgattagtgccggcatgatttattcactggtcagcggctcgatcccggctctcagccattacggattcttccagtttatcgggtcaacagaatgggatccccatccggacagagaaacttatggagccctttcctttatcgtgggaaccctcctaacctcttttctggcacttatattctgtatcccattttctctgcccgtggcacttttcacgggtgaattctttcgaggtaaaaagattgccacgttcatcagttccattatagatttactcgcgggaattccctcgatcgtgtacggattatggggattttataccttccgcccgattatcatcgagatgggagtcaattcacaaggattcggagtattgacctcatccattattctggcaatcatgatcatcccctatgcatcctccctcagtggcgagttcatatccatggttcccaacgaactgaaagaggctgcatatagtttgggagccacccgctacgaggtgatcagaacagtcacttttccctctgccggttccggagtatttgccagctatatcctagctctgggacgggctcttggagaaaccatggcagtaaccatgcttatcggcaacacgaataacttgcccacctcactggcagacacgggtaacacgatggccagtatcatcgcaaaccagttcggagaggcagacgggttaaaattaagctccttgattgccatcgggttactattattcctgatcacggcaatcatcaatctagtggcaaaactcatcatcaagaaacttaattgattgcaacaatgagtagtttaagatatagaacgataaaaaacaaggtctttttctacacgacctgttttctggcctctctgacggtaatcccgttattcgccatcatctgggaattaatcaaaaaaggctacaaacagattaattggaactttttcacggagagcgctccaagtaccttggacgccatgctggccagaggtacgggagacattattccgggcggaattgcaaacgggattaccggtacgttactcatggttgtcctagccgcaattattgctatccctatcggaatcatggtcggcattcatctctcggaacacccgaagaccaaattttcgaacatcactcgtttcttgacagatctgattcaaggtagcccttccatcgtaatcggtattatcgcttatgcatgggtcgtgaaacccctaggtagttattccgccctcgcgggaagtgtcgcccttagtatcatgatgctcccgttaatcgtgcgttccacggaagagacgttaaagatgctcccgggaagtttgaaagaggccggacttgcattaggagcctcctacaccagtgtcattctaaaagtattgttacccgcagccttcgggggattgttcacgggtatcttgctggctatctcccgggttatgggcgaaaccgcacccctgatgttaacagccttgggtagcaccgctatcaactgggacgtgttgaaacccacgagcgcggttcccttgttgatctgggagttttacaatgacccgaacctgatcgacatgatctggagttcctccctcttcctgttaatgttaattctgaccctcaatattatagcaaaac

SEQ ID NO: 430 - DNA, 3927 bp, Butyricimonas faecihominis
aatatatagtgttcaataatttcaagttatagcttgcttgcggaagtccgaaagattcagcctccttgaatttactcttcgcttccccgtactgacctttcaacatataggcaacacccgttgccagtgttttttctttgctatccggagcccggagcaaatacttttccgccgacacgacatccccttgcattaatgctatacacgccgcattgaggttagccaccggattttcaggatgatataaaacagcagttttaaacacgttcatatattgttgactcccctcgggtaaagtttgtgcaatccggaacatctcctcgatactcaggttcttcggttgggagtgaaacacgattcgcgcttcttccaacgtgaaaggtctcacaacatacttgatcgtgcattccgaacgtcttagtgccggaaaccacttgctcaccacgacattaaactgtcgggaataacgtttcctcaaccgttgttccttttggtcgggagcaagatcactttcaacgatacgtaaccactcgttactattttttaacacggaatctctcaacaaacgtcctactccttcccaatcttccggagtataatttgtcgtgaaaagagaatccggaaaatcatactgatcggaaatataatctttcaaggcggccgttctcccttccgcaagccgcttgttattcatatacggcccctccggtgatgcaaatccatgaatatgaataccggaaatcgtgacaaaagaatcccgctttaatacatcaataccctctttgattttatacaattcggcagcattatttctaaaatcttccagaatatctgttttgttcaggggaaaatccagataggcacaaatcttctcattccggtttttcacgtcttcaacttggggcgtcataaatgccagttgcgggtgtaactccgacaacgtattcaatcgtgccacatcttgggaaaacccatcctccggctccccgcaatgacacgagttctcttcaagagaaagaacagaatggttcatccactcctcgaaggggacggaacgtaaatatgctattgtctgaacagaatcatcttgccgacggacctccagatgacccgcttgaacaaattgtttggaattacgcaagtagacgaaatgttgtctacgtccgttaatatagactcggggaaattccataaaattcttcaaactatcacgtagttgcggtatcaacacgagagattcgttcgacgctagttttcgcgatacatttatttgcatggagacaactagctgttttcccatacggtaaagttgcgcctcattcaccgtaacggtactatccttctgcccgtgtgcaagaaaagagaagagaaagaaacatccgcaaagaaaaatgtgtctcataaccctttaattaaaaacataaactatacttaaagaaaacttatccggtccgaaatagtggtaactttctctctccttccacgctgcacacaaatccggacacgcatatttatcgtagcggatatactcgtaaccaatccctaaagaaacctccaaattccaatgtcgattcaaaatgaggtggtacccgtaagagataccgcctcctgtcaaccagccggagtaacggtgatttttcaaccacttgaattttcccaataacatatctttcccaccaatattgaattgagccccgttaaggaataccccgaaaaaactcccgttaaatttttggcacgtccagtaacggtactctgcctgtaacaaccaataacgctccacgtatctttccgttcgcttccatggacgtaaactcccggagaaatcaactgtcgatctcatcccgaaagcatactcaatccctccgttcagggccccgttggctagagagagcaaattactttttaccgcaaaattctgactccggaccgtaatacttccgaaaaggatgaggaagaaaaggatcgatttgattttcatgttcgttttaattattgatttaactcaaaaaacaatttcaagttatgatctgcctcctcgcacccctcagccttcgctgacttcagaagacgtattccctcgtatgtattatcacacagtaattcgtacacccctcggcaatttttgtaagcaatggtatcgtacaaagccatctgcaagtacatacccgccatccgtatattcccccgttcaatggccgcattggccgcattcaaattagcaaccgggttggtgggatatatcttcacgctcgtctctataatcttgtagaatttctccggttcatccttatagcttaaagcaaccatgtaaagttcccgcaaggataatagatgcggctttaaattcgcgatcactttcgcctcttccagactaaaatccagttccttctggttccgctcgtcggtagcatcacgttccggttccaaataacaccccttgaaacttttcttacccgattttattggcaagtcggcaacctttgtcgtgtcacgcaatacgtttggcagatttgaggcatacccgcccatccgttcgatctctatttcccgcgaggataaaatcgttgacttgactttatgaccgttttcatcaaaaatttccgcccgaattgaaagaagtgaggttgacaagattccttcccggacaggaattaccgttctataatcgatatattgattttcaggatttatagccgcatacactccggtaacccctgccgactttttgcgcttctgtaacatctgttcgcgtttgtacatcaaatgagcccttttcccattgaccagtatacaaggcaattccgtttgccgtccctgcccggaaaggataggggtaagcgtcacgtgtccccgggtttccagatcaggaacactcactaacatatgccaagaaataaccagagaatcctgacgcacgttgactacaggggactgtatttcgcaattaatctcttgggctgaaattctgcctgtcacccataacaggataattagaacaaatacttggatcttcataagacaatatttttactgaataaaatacacaaatgataccccgacatgcgtgactccccaataattctctttacgcttatcttgtaacaaatctccttttgccggaccgtattgcttaaaattcaatcgaacatatcctgccgccagagaggtttcgatactccagcttgcactgatcggccactggtaaccacaggaaaaaccacccccaaccacactcccttgataacggtgctttttcaacacgttaaagagtggcattcccccgatattaaaccggctataatacatttgcacccccacgaaaccaccgtcatacacgccccggaaccatctcttgaacgaggggcgaatcaagacgtgtttcatctttttattatccccccaagtccatgggttataattcaaattcatttccaaactgtaccattcaccacatcgcatttcaccaccaagatttaaagttcccgtcatccaaggcaagacgtttgtcttcacggcaatcgtctgagcattaacccggcaaaacggcaggcacgagaataatattgtaataacaatccatttttttttcattcctatgtttcatttaaattgactggttaatacaaaacttcgaattatatttctgtttctcagctctaacagcaccaaataagaattcatttttaatttgacctttttgccatgtaccagcttgtagacatgttttacaggaacattatatttcttggacagttcataatagatcgatttattctctgattgccatatttttaacaacacgatactcatatgataactattttgaaagatgcgaaacatttagaacaaacaagccgcaaaacgggcatgaaatcacggataatcattccgtgatttcatgcccgttttgcggcttgtttgttc

SEQ ID NO: 431 - DNA, 3923 bp, Butyricimonas faecihominis
accttttaaagcatataaaaatgagtcttgcagaattaagcgaacaggaaattattcgccggaactctttaaacgagttgaaaaatttgggaatagatgcctatccggcaccggaatttaaagtaactcacctttctaaagagattctggataaatttgaaaaatcaccggaggaattgcaagaggttgtaattgccgggcgaatgatgagcaggcggattatgggtaaggcttcattttttgaattacaggatgccgaaggtaggattcaggtctacgtgagtcgggatgatgtgagtcgggatgaagcttgcacgatgtataataccgttttcaaaaagttgatggatattggcgacatcgtgggcgtgaaaggattcgtgttccgcacgaatatgggggagatttcggttcatgcgaaagaactggtgatattgtccaagtccttgcgtccgctaccggttgtgaaagaaaaggatggtaaagtgtttgatgcttttaccgatccggaattaagataccgtcaacgttacttggatttaatcgtgaacccgcaggtgaaggatgtgtttatcaagcgtacgaaaatgatcaacgccatccgtcagttctatacggaaatgggatgcttggaggtggagactcctgtgctgcaggctataccgggaggagcttcggcccgtccgtttatcacgcatcataatgcattggatattccgttctatttgcgtattgcgaacgagctgtatctgaaacgtttgatcgtgggaggctttaatggagtattcgagttttcccgtaatttccgtaacgagggaatggaccggacgcataacccggaatttacttgtatggaggtgtacgtgccgtacaaggattatttgtggatgatggatagcacggagagaatgattgaggcggcggcaatggccgtgaacgggacaactaaagctcctttcggggagaacgaggtggatttcaaacgtccgttcaaacgagtgagaatgtcagaggcgattcaagaatataccggatttgacatcacgggtaagagcgaggatgagattcgggcattctgtttgtctatcggcttgaacgtggatgagacgatgggtaagggtaagttgattgacgaaattttcggagagaaatgtgaaagtcactatatacagccgacctttatttatgattacccggtggagatgtctccgctgactaagatgcatcgttcagatcccggattgacggaacgtttcgagttgttcgtgaatggtaaggaggttgctaacgcttactctgagctgaatgacccgatcgatcagttgaatcgtttcaaagatcagttggcacttcaggaaagaggggatgatgaggccatgtttattgattacgacttcgtgcgtgccttggagtacggtatgcccccaacctcgggaatgggtatagggatagacaggctttgtatgttcctgaccaatagtccgtctatacaggatgtgttgttgttcccgcagatgaaaccggagaaagtggctaccgtggatgctgacgagaaatttatcgagctgggaatcccggctgattgggttgccgtggttcgtaaagctggttaccagaccgtggaaaccttgaaggcggtagagaacccgaacaagttgcatcaggaattgagcggtttaaataaaaaaatgaaattaggcttgaagactttatccccggatgaggtaaaaagctggtttaactaaaataaacgttgctggttacaggttggcaggttacaagttcgtgtaggacaaaacctgtaacctgtaacttgtaaacttgtaacttattggtatcatggaaatagttgaaaaaccaaggattggagtagttggtgggggtagttgggctaccgctatcgctaaaatgctgacagaaaataacgggcatattaattggttcatgagaaacattgaatcgataaaggcctttaaagtattaaaacacaatccgcggtatttgtgtggtgtcgattttgatatagacaaaatctcgttctcggatgatctggattgggtgatcatgaattccgatgtgatcgtgttcgccatcccgagtgctttcctacaaaacgtggtaactccaaggttgcaagtgtcgttgaaagataagattatcgtttcggccattaaggggatgattccggatgagaatctacttatcggggagttcttccaccagaaatacgaggtacctctaggacagattgtaattatctccggtccctgtcatgcggaggaaatagctttggaacgtttgtcttatctgacattctccagtgagaacctgcgggtagcacggactgtggctcaattattcgagtgtttctacgtgaaaaccacgatttccgatgatatatacggggccgagtatgccgcagtgctgaaaaatgtttttgctattgcgtcgggaatctgtcacggattgcgatatggcgataattttcaggcagtgttggttgctaatgccatccaagaaatggagcgctttgtgaatgccgtgcatccgattcaacgggatattaaattttccgcgtacttgggagacttgttggtaacagcctattctcagttcagccggaaccggacattcggtacgatgatcgggaaaggatattctgtgaagtccgcacaaatggagatgctgatgattgccgaagggtactttggcgtgaaaggaattcatgaaatcaatcaacagtataaagtccacatgcccatcacggaggctgtttataacattctctacgagcgaatcagtccgacaatggaaatcagattgttaaccgatgagttgagatagtttagagtttaaagtttagaatttagagtttaatgttgattattggggaattgaggttttagcattttcaattttcaattttcaattttcaattaaaaagtatgtcaaattacagtgcgagggttttgggatgtgtgaagaaggccttacccgtggcgataaagacatcaatatggtttttgaaaatcatgctaccggtatctttgttcgtgactttgttgtcatactttaatatactgccttatatttcttcatttgcatccccgttgtttaccttgatcggtttgccgggagatgcagccttagtctttgttaccagtatatttacgaatatatataccgtgatcgctttgctttctacgcttgatttttccgtgcgggaaagtttgattatggcaacgatgtgtttgatttcccataactttgtcgtggaaacgatcgtgttgcagaagacgggttcgtctgctgtgtggatggtgatcttgcgagtcttgggaagttttgttgcggccatcggtttaaattggttgttgccggaaatgagtgggaagatgatggcggaaacggcggtttctctcggtttttgggaaacgatgttgcattggctggaaagtagtgtgatgctggggctgaaaatcgtactggtgatttcggggttgatgatattgcaacggttgttggaagagttcggcattttgaaaatattgtctgccatgttatccccgttaatgcgcttgttcggactgaatccggatgtggctttcctgtggctggtggggaacacggtcggattggcttacggttccgcgatcatgatggattatgccaagacgggaaaactgggacatcaggaggcagatttgctgaatcatcacttggcgatttctcattcgcaactggaggatccgctgttgtttgccgtgatgggattacctgcggggtggttgatatttccccgtgtcgtgttagccgtgattgttgtgtggattcgtcggggcatttatttattgcaggtgcgagtacacccaccggtaaaagttgaaaatattagtttataaaaatatgaaatacactattga

SEQ ID NO: 432 - DNA, 3902 bp, Butyricimonas faecihominis
aggatggattttgatgtatgagtttgatttatatctagttgtgctttgagagatatgaataaaaatgttaaaatagcactatttagagaggcgcaataaacgatcgttttttgttatcaaggatgcaaaaaattgagaagataaatatgcgaaaacaggaggtgtttgatagctatttccgacgttattatcaaacactttgttactttgcatttaactatctaaaagtgcaggatgaggcggaagatgtggtacaagaggtgtttataaaacttttgaactgggatgaaagttttgataacgaggaacatttgaaacattatctttataaagctgttcgtaatagttgtttgaatcaaataaaaatgacggggattcgtgctgatatattggaatctattcagaagaataccccggaggacgagaataattttttcgtaaatgtggtacgagctgaggtctatcaagagattatgggagcaattcaagacttacctacagaatgtggaaggatttttaaattagcttatgtggaaggtttcagtaatgatgaaattgccacccaactttcaattagtgtaaataccgtgaaggctcaaaagaataaggcgaaaattcaattgcgggaaaagttaaaagggttgtatccagtgttgttatttttattttaaataacgcttatggtctggtatatcgaagtattgttgcgcataccggagggggagagggaaaatcatgggtagaatggcgcacaaacttggagcgggtgggaaagtacgagttgttcgtgcatattcccgagttttctgctatgaatataatgtataaaagtaatttgttatcacaacgggggacacaatcgtatacaattgtgttactggaagctagatatgagatttctatcaatacttctgattacgggtggatttctttgggtgagtatgagagtacctccggagagtgtgttgtcatgttacatgatacaggagatccgaaccatattattatcggggatgcggtgaaatgggtgtacgtaggagagagaggatgaataaaaatgtataatttgaaatgatgaaataaaattattggtgttgattttatgtgtagaacgacgatttgtcaattaaaattagcttttggtatgagtactagtgatatgtagtaatcgctaattgatgatgttgaaaaaatagatcaactcaaaataaatgtggtgagattttttgaaaaaagttgagttttgcgtaatccttttttggaagttatttgtaataggggaaattttacaagagagatgaagaatccatttgaatttacaaaagagttattgcggtatacccgaggagaactttctaaggaagaggagaaagggatagagcaggtgttgtcggaagtggagggaatgaatacattggtgggggaactaaaggataagaaccgaatcgagcatgaaatgcatgttattgcaaggtttgatacggaaagggctttaggtaaagtgaaaaatagaaaacaggtaaaaagaagaggaatattaccttggattgcggctgcgtctgttgtggtaattgcaggagtttctgcttggatattgttaagccaagaaccggatgtacacaatttgcctgtagcagaaaaatttgagccgggtaaggctgttgtgacattagagatggcatccggattgaaatatcgtttggatacattatcttctgttgttcgtaataatcgggtaaatgttgcttttgataataatgatagagtactgaaaataaaagagcaagattctttagcagatggtgctacaaaagaaattgggtataacacgatcaatgtaccatatggaggaacgtatacggtggaattgtgtgatggaacgaaggtatacttgaattcgggaactacattggaatttccttctcggtttgacggaaaagttcgcagtgtaattttgaaaggagaggcatattttgatgtagctcgaaatgtaagtaaaccgtttgttgtggaggtggatgagatgaaagtgaaggtgttgggtacatcttttaacgtgaaatcgtatgttgatgaaccaggggtttacacgacattagtagagggtagtgtcgctattcttcgggatgggcaaccggagaagaagatcaaaccgggagaacaagcttattataataagggtgtcggaaccttgagtattgctgaagttgatgtcaatgaattcacgtcttggaaggatgggttgttttatttcaaagacattgctttagaagaaattttgagaatcgtctcaagatggtacgatttggaagtattttacatgaatcagggagcgaagagtgtgatatacagtggtaaattgccaatgtattcttctgtggaggatgtgttgcggaagttcgagatatccggagatgtacgttttgaactgaaaggtagaactttaactgtttttgataaataaaaacgggattgggcaatcccgttttgtatacccgctcgttgggcgacgagcagaataaatgtttaatttaattgaattacaaatctatgaaaaaaaattgggatttgttgctgaatttttggcaatatcggaaatctaaattctttttgcgcatgaaaatctcgatgattttattattggtgggggtgatgcacctttccgctaatacgttttcacaaacgaaagtgtcgttgaatatgaaagatgcaacagtgcaggaggtattttccaatttggaaaagatgacgaactataccttcctttataagttggatcttgttaataaatgtggtaaagtaaatattgatgccacagatcaggatttcagtcaattattgctggagttattaaatccactaggcttgtcttttacaatagatgatcaagtggttgttatcactgcaagtaaggccaaagatgatgttaaaaaagagcttactatcaaggggcgtgttttcatgaaagatagtacgggagttccgggagcaacagttattttaaaaggaacttcgacaggtgtaattacaaatatggcaggggaatttacaatcacaattccttatacagaatctcctgtattgatcttttcctttttgggaatgaaaactcgtgaagttagatatgttggacaaaaggagatgatggtgttgatggaagaagatgtaaaagcgatggatgaggtaattgtaacaggttatcaacgtattcgaaagtctgatatggtaggatccacgaactccgttaaacgtgaggatttgttttttaatggaacgaattcaattgagcagatgttacagggaaaacttccgggaatggtagttatgaatacgagtggtttggttggtaaacgtcagaaagttcgtgttcgaggaacttcaaccttattaggtaatcaggaacctgtttgggttgttgatggaattattcaagaggatccattaccctttaaaacacgtgaattagatgctttgggtaatatttctcaggacaattttgatatggtaaaagatttcgttggaaatgctatttcttggttgaatcccaatgatatagaagatattactgtgttgaaagatgcttcggctaccgttatgtatggtgtgaaagcggctaatggggtaattttgataaaaacaaaacagggacaagcaggtagaatgtccgtaaattatagtggagatatatccattactcctcggttgacttatgaaaaaatgaatttaatgaattctaaagagcgtgtggatgtttctcgagagatttatgaaagaggattaacatctgataaccgtccgttggaatcaatcggttatgaaggagctttagggcgctatttggccaaagaaatttcttatgatgaatttaatgatgaagtaaaaaagttagaatcaacaaatac

SEQ ID NO: 433 - DNA, 3898 bp, Butyricimonas faecihominis
ctatattggttacccaagtctgacccactgccccattcttgtcctaaaacaccaaccattccaaatgtcatttcacgcccgtacaattctgtctgggacataccaatgtagactccggctaaagcagatttaaaaccatccagtgttgagaatagtttatcagcctcctcttccgtcttgggcttcacctccaaccagtcattacatgaagtcgtgcaaaataacgcaagcatcaccgcacacacgactcgtaaacgatatatatttttcttcatcataacttcttattttatcaccattatcaaattagaatgttgcttgcaaagagaatgaacatgaacgtgcaaacggatattcaatacctctttcagcctttatcgtagaggtcctgaaaacatcattcatataaaattgcaatttcaatctttcaattccagtctttttcaagaatccccaatagcggaagtcatatcccacgttcaaagaggtcatttgcaattcacgcacatcctgcacaaaacgagaggtcggacgagtcaaagctgcataaggatcaaatttcctaaatttagccgggaccccgggagtcgtccaacgatctgtcagcatacgtttgtcaacattatactgaatatccacgttttccaccttatccaccaatgtctggttataatactgaccacccaatttataatagaatgaagtgttcacactaaaacctttatattcaaaattaaaaccaaacgttccacttaatttcggttgcttatccccgacaacaacttggttatcagatttccaaccatacgtcattttgccctcccgatcaaggaagacctcatatcctgtagccggatcgatccccaatgaacgtactgcccagatggcatccatagactgcccttcttcataacgcactgaaggtttcgttatatccgaattatcttccaagttcggatttccacctccaccatttgccttatcctcatccctgcttttattcatcaatgacaaagcatctgaaattttcgtgattctatttttattatgcattccagagacgaaaactgacagatacatatcctgatccgtatcttttaatacacggtaatttaccttaaattcaagtcctttattttttgtttcccctaaattttccgtgtagctagtaaagccggctgaaggaggtaaagatacgggagtcaacaaattcttcgtatttttgacatagtaatcgaaagtgatatccaaagcatcaaataaagtcaaatccatcccgatgttattatcttgagtcttttgccattgcaaatcaggattagctaatcccatcaagtaagaaccgataatattatcatagatctcgttataatatttataagttgctatcgcttgataagaattaaaattctgagaaccggaataccccgttgaagcccggaaacgcaattgattaagcgcactcacattttccatgaaatgctctttatgcacattccacccgataccggctgaccaaaaatgtccccatctcttgtcattaccaaacaaagaagaagcattagctcgataagtcgcatcaaacaaataacgattgtcataggagtagttcgtggagatcaaaaaacttgcctcacgagacaaggactcagaacccgtcggaccaccttctgcatattctttagcatgagtaatatagtccatcttatcattagcaaatccacgagctttaaattcaacataattatattttcgctcgctaaaactccattgtgtgttggcaaagatcacattcttaccgaaatcccgcgaatagtttgccgacaagtctgcgttatactcgaaatttttcccatttcccatcgtgtaagaacctctttcaaaatattcttctgaatccggatccacatctttaaacatcgtgtggtcacgcggataaaaaatctcagaatcatcctttttactgattatccctaaacgaccttttagcctcataccttgaaatgccaaccactcgatataaaaattattggttacatccgtatacgtactttcatttttcgtatttatatccgcattcgtcaacggattgtaaattggttttgtcccttgaaaattagccttctcataatcacctaaaatctctttcacggaaccatcatcattataagctctccaataaggattcaacttggcatactcggaaaacgtcccataaggagattctttcgctttgttaaaagtgacagataattgctcagaaaagatcaaactcttgtaacgatactgcatattaaaaccaacagaaatcacttcacgactagatcctttcattactccggcaacattgttatattgaaaatcaatcccgtaacgaacagcatcatccccaccttcaagtaacaacgtatgcttgtgacctacccctacccgtaacggtttattcaaccaatacgtgttcactccccgtagaacttctttataataagcctcgtatttctcatcatatccttgctgagtaattggattcccgtatttatccgtataaacacctgctcttttctcaatttctaatttctcggccgcattcgccaaattataactgcccaaatctggaatttgaatatttaagttcccagaataagacactcgcatttttcctttctccggcaccacagtctctataaccacaacgccattcgctcctttagaaccgtataatgcttttgccgttgcatctttcaacagcgttatagaagctacccggttcatatccatatccatcaccttctctattgactgctcgaaaccgtcaacaataaataaaggttgattcggattagtctggtatttatccttcatatccgtgaaactggaggctccacgcatttgaatttccggggctctattagggtcagaaccgaaatcattattttctaatacttgaaatgccggatctatatttttcagtgactgtaggatgttctgattaccaactcgctgtaattcctcttttttaattgttgttacagcacccgtataactatcagccttccgagtaaaaataccggtaaccacaacctcctgcatttccgtcacggaaggggccaacgtcacgtctatcttactctgtcccctataagcaacctcctgtgcctccatgccgacaaaagaaaaaacaagaaccatatctttcgaaaggggtaccgtcaaggcatatttcccgtcgatatccgtcgttcctcccaacgtggttcccttgatcataacggtcactcccggcaacgtctcgcccttctgatctttcaccactccggataaggtcacccgttcaatcttctcggccttcacggctgctttgcgaataataacaacttgattactggttaattcatattctaacccggtgccttccagacactgtttcaacgctgcatcaagcgttgcattcttaatcacgtaatctttccgttgcacgtgtttcacgtcatcattactgaacatgaaactcaattttgtctggcgcttgatctcgtcaaatacttctgacaacgaagcattcttcatgtcaagattcacccgatccgtgttctgctgcgcgaatgaaaacgatactgaaaccagtacaatcttcaccgatagtagtaaatggcatagccaccggggaataacccggaaacacttgcgttcttttttcataaaggtaatttgtttgattttacattagtctgtttttctctttttcgtgtctttctgtttgcggcagaaatacttagcttttccttttttcttttaattaaattccataactttgtacttagattttacattagtctgttaaagacttacaagggggtgatatttgcggtatcactctctttttattttagtattacat

SEQ ID NO: 434 - DNA, 3890 bp, Butyricimonas faecihominis
ataatatcttatggtttttggcaatgatagattcaaactactttgagaaatgttttgcttatggattttataggagcaaatgtccaaattgcattgatggacaagaatttgtccccagcctgactatcaagggacagacgggggacaaaatatgggtaagtataagcaaatatgagaaaatacagtaactaagagaaagaaaaagcaaataccgtaactcgttttctgatagaattatactcgattaaatcatataacttattgataatcaatgtattgtactattgccgatgcagaaaatgttttgtatcatttttgacttgtaatagattgatatttaatatattatgtttttatgaaatgcttcgggggacaaactagggacaaaaatttgctatccaaaagataaaaagagcaaatataaggtctatcccttgatgttttttaggccaatttttttgtcccttggaaagaaaaacaatcccgttctcatcatatgatgatattcgaagcacactgcaaatataataaagtttagtctgttttttgtatatctcttcaagttctaaactaaacggcttttataagctcccaaagctatacctatttttcttttggccagcaaaattattaaaggagaccttactttgtcctttcagttctgtctcttttcaccagtcgttgtttgggctatgtgctttggcggaatatcctcggttttacctttccctgttttagcctttttcttacttcctccattattccgcatatccctttcgggctacctgatgtgaattgtgtcgcaaaggtgcttgtcatgtctctcttgtctgcaaggtcatagccttgggttcacagccaaatctccaccttctgcttcacagaggtcgtatttagccgtgaaaccttgcataaggagtcatgacaccttttgagacgacataattaaatcaagcccgaaagtagtagatgctacaagagggaaaaacaaaaaaacaatcttaaaatttaagcattataacattcagaaaatttatgaaagaaaacggtaacgaaataaaaacaatgttttgggaagatttttcgatagcagagcgatttgtcctttcagctattcaggacacgttcaatcgtgctttcaaagagtggaaagaagattacgaatttctaaccgaactggtattggtgcttaactataagatatggcaataccacgaaaaaagaccggagttcgcggaactctacaataccctttgggaacagaccgaccaatatgcgatggagaatctgaaagatgaagagctaagttatttctttgatgtaacggattaagcgtaggagtgtagggaaccggctttggtcgggttctcatccgtgcggatccctttttattagcacggatttcccttgttggagattacgattgcagaattacagaagctacacgaaagcgaagaacatatagaatttaaagaggcaaagcataattacctgtttgccggaggaaaacacgttgatctgaaagacaggcggcggtgtgtattggggtgtattgctgccttggcgaatgaaaagggtggacgattggtattaaggaatggtagatcatatgccccatgcggttgttggttcggattttgcagaaaaagaagtgggagaactcacagatgaaatctacgaaagattaggaataaggatagaaactaccgaactttacgaagacggtaagcgtgtgcttgtactatctgttccatctcgtctcgtaggtaggttgttgagatttgagggcgtacctcttatgtgtacaggggaaagcctgcgggcaatgtccgatgccgagattttcaggatattgtctgaataggaaccggatttttcagccaagatatgcgaggggcttactatagaggatttggataaggaggccatagcagaaatgaaaacccaatatgcgcgaaagcaggaaaatccgttgtttcaaaactatcccgacgaacaagtgctatctgatttggatttgttgaaggacgggaaattgaattatgcggcactcattttgcttgggaaatccgaagccatacggaaatatctccctcagaacaatatcgttgtagggttcaggatgtatcactcgatgatacaatataccgctcgcaaagaatttcagttgccgttattcatagcgattgacaaggcatgggattacatcaaccagcctgccagcaatccgcttctgcattacaatgacggctcttatatattcgatataccatctttcaacaaggaggcaatcagagaggcgatattgaatgcttgctgccaccgctcaatgttgattcagagcgatgtcgtcatcaagcagtatcccgatagtataaccattaccaatgctggtggttttctgtccggagtggatatgaacaacattttgacagtgaacagcgttccgcgcagtaagctgatgagcgagatattgcagaagaccggattggtggagcgttccggttagggagtggaaaaaatgttctacaactgcattatggaggggaaagagctgcctgactattcgggaacagacccgtatcaggtatgtctcacattcaaagctcctatacttgataaggcttttgtcattttcatcaggaaggtacaggacaatagacctgcggccgagcaactgaatgtctttgaattgctggctttgtacaaaatagcaatgagggattacgaggggctcgaagaaaagactttaaaactgtcggaagaaaaccttgtcatttacgaaaatggctcttatcgtttgtccgaggaatatcggaatgagtctgctgagagactgaaaggattgaatatgaatcacctcaagttggtttcagactgtttttataaaaatggttatataaatcgttctcttctcaaaaaggtattttaagacatgttgtccgaaaaacaaattagaggcttgatttcaaagatggaaaatgcagggattatacagaaagatggtgcaggcaaatatacccgttatgtaaaagcaccggattttccatcgtttgtctagggccgcaagaatcaattttagggccgtaagatttcaactgtctgtttatcagcttatttgattagggccgcaaaagtcgattttacgtccacaaagatttccgacaatagactgaaaaatatgaaaaatccttgtaataatttggtgattatcgcagggatttgattttttagcactcctaatcaaaagatttagataagcggagccttatgatctactttccatacaatgaggaaatgtgtagttatactgatacatggatgggtgaactatatgaaaacgagtatccattggtttctaaaggggtatggtcaggaataatcaatttgaaaactcataaacttctgaattcgaagcccgaatatggcagtttgtatttgcaagccaaggtatgtgatagtgggacctatttcttacttgacaaagacaaaaagacaatatgtaaaattgcagattatgttcctaacggtttaattccagaggtagatggttgtggcgattatattcgtcttagaatcaatgaggatgacatgataaattggtttgaagaaccggacttttctgactttatggaagactttgaggttgttgagaaaatcgatgtgcacattaaagaagaaatctatactgtatatcaaagtcgagttcatttataaccagcttatggcaaaattgtttcgattgcctaaattcatacagatggaaataggaaaggcgttgatagcaaatgcttcggaagaatttgaaaaggaagagtaagaacatccttcttgagttacatagtttatagtaatgaaccctgctaaattatatcttcactgatataata

SEQ ID NO: 435 - DNA, 3864 bp, Butyricimonas faecihominis
tttgaggataaaataccttttgacacaccctcttatttctaagagaatatatgagaaaaatagttttattattgttgttgggatttgtccaactttactctaatgctcaatataaaatggacacctcggttcccttgaacccggacgtgaaacatggaaaattgaataatgggttgacctattttatttgtaaaaataacgaaccagtaggtcaagctgacttttatatcatccagaacgtgggtgcgctcatggaaaatgatgcccaaaatgggttggctcatttcttggaacacatggctttcaacgggacggagaactttcccggtaactcgatttctgaaatcctgaaaaagtacggtgtgagcatgaatacacacgtgaatgcgcagaccggacataacgaaaccgtgtattacttggcaggaattcccaccaaagaagagggattaattgattcttgcttgttagtacttcacgactggtcacgttatattacttttgatgaaaagacgatcgacaaggaacggaaagttattatcgaagaagagaggacaagaatggatgtgggtgagcgattaagagccaagacgatgcctgtgatgctgaaggggtcaaaatacgtgaaacacaacatcatcgggaacatggatgtgattcggaattttaaaccgcagacactaattgattattacaacgagtggtatcgtccggatttgcaggctgttgtcgtggtgggagattttgacgtggaaaagatggagaagaacgtgattgacttattttcccggatccctgccgtgaagaatcctacgccgcgtcctttttatcctgtacctttgaaagggggtgtttcttattcgttagttcttgataaagatgtcccttactcttttgtttctttgaatattctttcggagacgacaaaaccggagttaaaaaatcacgggtatatgaaagaggctttggtggaagctttgtatagtttgatgtttcaaaaccggttggctaaactgacacaacagaagaatacgccttgtctggctgctgatagccggatgaatgctttagtacggggttaccgggtttacgctatctccacgacagctgctctaaaccaagaagacaaggcgttagagttagtgtataaagaaaatgaacgcttaaaaagattcggtttcacggaaacggaattaacggatgcaaaaaagttgttactaaccagttttgataatctttacaaagataaaggtaaactttcaaacgggcagattgctgcagaacttcaatcttatttcttggaaaatgaaccggccccgggcttggagtactattatcgttttgtccaaaccattattccccagatcactgtggaggaagtttctgccaaggcgaaagagtggatcacccgtgataacatggtcatttcgattgctgggcctaaaaatgcgattcatcttaccaagggagaggtgctgaatgtgttgaaacgagtcgaaaaaatggatatagaaccttacgagaaggagaaaacaactgccagaaaattaatgatcggaaaactggcagggggaaagatcgtggaagagaaagaattactaacattacatgcaaaggagtggatgttggataatggagcccgtgtcttgttccggaaagcaaattacgagaaaaatcaagtggaggtaatggcctatagtaaagggggtgcctctttgtatggtaaagatatgctcccgtctgccatgatgttaggttctttcatgccggcttatggaattggaaaccttagcatgaaagagttgcaacaatatcttgaaggtaaaaatgtgagattccgggtaagcgtggaccctttgtcggagtctgttctgggatcagccactcctcaaaccttggagacattgatgcaattgatttatctcggttttgaaaagccacggttcgataaagtaacacacgaactgatgatgcaacaagcgagagcctcgtttcaaacatcacgggtgaatgattccttgcagatgatcatgaataattataatccgagaatcgtgttgtataatcaggattttctggatcaggtttcgttggagaaaatagaacggatttacagggatcgtatacaagatgccagtgattttactttttttatcgtgggagacgtggaggcggaacaagttcgaccgttagttgaaaaatatattggttcgattaaatcgacttaccggaaggaaaattggaaggataacggggttcgttgtccgcagggtgttacccggaaagtaatcgaattggatggggagaaagcaaaagcgacggaaattgccatttattccaaggagatgccctataccgtgaaggataatatttatttggggattttgaaatctattcttaattcccgttgcctgcaaagaatccgggaagaggtagggggaacctataatattgatgtgcaaggctcggcggagcgggaaccgtataacgtgtacgatcttagtattagttttgattgtgacccggctcgtttggatgaattgaggtccatccttttcaacgtgatagagaaaatggtgaaagagggtccccggcaggatgaactcgtgcagcttgtgattgctatccggaacgcttacaacgagacgatgcaacataatcctttttggatgaatgccctgatgatgcaagcgctctatgatttggatattactgatcctaagaatcagaacgatatacttgattatgttactcccggggatattcaggaatttgcacgacgtttattcgaaaatgccaatttgatggatatatctttcgtaacgagagcgaagtgagatcggctgttagttgagtgtgtgttgggacgggactttttagccccgtcctttttgtttaaaacggatactgtgttacctttgtctttctaaaattaagcataaaatgcatcttatggatataaaattactaagcccttcatgctggtcagattacgagttaattgatagtggtgctttcgagaaattggaacgtttcgggcggtacgtgattgcccggccggagccgcaggcgatatggaacaaatcgcttcccgacgtggaatggcagcaacgggcggatgcttatttcaagaaggataagaaaagcgaggaccggggagaatggatttgcaagcctaaaatgccacagcaatggttcgtgaattaccgttacggggagatgaatctccggatgcgtttgggattgacttctttcaagcacgtggggatattcccggaacaggcggagaattggaattttatattcgatcaagtgaaacgaattggttcggaggcaaaagtgttgaacctgtttgcttacaccgggggtgctactcttgcggcgaagagtgccggggcggatgttacccatgtggattcggtgaagccggttgtttcttgggctagggaaaacatggaagcttcgaaattggatggtgttcgctggatcgtggatgatgctttaaagttcgtacagagggaagtacgtcggggtaaaaaatataacgggatcattctggaccctccggcttacgggcgcggtgcgaatggcgagaaatgggtattggaagaaaatatcaacgagttgatcaccttgtgtgggcaattgttggaaggttctaatagtttccttgtgcttaatttgtattccatggggttatcagccttgttggcccggagcatcgtgcggcagttggtcggtgattgtaccggggaacaattcggagagttgtattttaccgattcatacgggaaatcgttaccgttaggagtttattatcggttgtggcgtaagtagtgtggttttatattattacttttgtat

SEQ ID NO: 436 - DNA, 3828 bp, Butyricimonas faecihominis
atttaaaattgagctaccccctctggctccccttacacaagcgaagaggagttaaaggaggtagttaaagaggtttcctcgtgcgacctaatctaaaatctaaattattaaatcgttatcccgaaccctaccgcaaaaggtcgcaactccggtgcccgattcttgttaaacatattggtcaacgagtaatttccccagatacacacaccacggtagccaacccggagcgtataatcaactttaaaaggaaccatcccataactcccgttctctttcagtttacgtttatttcccttctcgctcgtgtaaacgacttttgtcttggagtgcaggcggattcccccgataaacccagtggagacataaaaccttttccaatgtggagctgggatttgtttttccaacatcaaaggtatcgttaaataaagagctttgaaagtactccgtttcacctcctcgatccccaagtcggacaatggcacagcgtgaagcatctcgcctttcttgcggcggacagttatatcaccgtcaaaacacaggcgggagtagtcaaggccgaatcccgtgaatataccgaaacgctgccggggactcaacccaaaactaaacttggcaaagttgaagtgcatcgtgaacgagctagcccagtccagctccatgaagtcattcccgccatacttggaataattggttttcccgaaattcacgaacccgaaatagaacccgttccaatgcccgcgaaacttgttcggacgaggcaccttaccggaaagagtattgaacactctagaatctaagggaggtttgaccacgttgtttctcctttcttcttcgctttcccgcaccgtgttgtcccagataatcatttctgtttccttgccgagggtgtcgatgacctgccctttcacgcgaatagtgtccttccgccagccgtcgttgacaatcacgctatcccgttgccccgcggcagacagtccacacaccatcaaaatgataaaagctgctattattctcataaccttatttttatttcttacatgacgtttaagtttcccaattagttacaagctctctatatcttttttctctttagcccggagacgttccagcacgttctttcccacatcaatcaagttattcacgatgttatctgactttcccgaccgggtaatcaattgaaacacgggttctcgttgttctttcaccgatgcccggaattgaagtccctcgtacggggaagtcagtatctcgttcggttgcggggccatgatctctacaggaactttcagttgctttttcaattcgatagcatccggcggaatcacccgttccacgcccacgattgtttctcccgcttctgcctcccgtttcataaactgcaccctctcaatctccggttccacgattgcctccggctccggtatccccggtaacaagattgtctccgtcttaaccacagtcactggtaaatcctccatggaaaattcttcttttctcgtggaataaatagccaccacgatccccaaagccactaccgcagcgatagctgcgtagcgtttgacgaaaagtaccgccccggacttacgatacatccctgctttcccctcgaatcgacatgtcgggtcaggctttactttaatcttggcacacgtttcaacttcccgttcaaacacgtctttatcgacattcccgtccacccacgcctgttcttcatccgtgataacaccctcggcggtagcaatggcataatactcaagttccctttcccgtaccgtccgttttatctcttcttttttaccgaaaacttccgcaggaacttccagtcgcacctcgtccatcccgtcgagtaactcccgcaagtcggtgtaaaccaacaagaatgcctccacctctgcctgttctctcgccgacaagttcccatccatgtactccatgaaataaatctcgtaattctctctcgttatcatatctcctcccgcttaaacaaccacatccggcctgcggatataggctttcataaatgctctcgcccgaaagatgtacactttcacctgcgattcgttcaaccccgtgatcccggcaatctccccgtaagaatacgcctcgtagtcccgcaggagaatcaccgttttctgcaccgggggcaacttttccaaggctatattcaatatttcttgtaaccccgtgtattcctcccgcacctccccggcccggtctgccacggtctcaatatccccaaacttcgtttcccgccgtaagacgtcaatcatcctgtgatacgccgtgctgaaaagaaaagactttgccttatcgtaagcgatatgccccacttcctcccaaagtttcatgaaactatcttgcacgacatcttccgccatctccttcgacttgcacattttaaggataaaacgatacacaccatcggagaaatggtccacggcccggttatactcggttctagtcattctgttttaccttggtccataactcgacacgtttcacgtcacgccaacgcacgtaaacgacttctccccccgtccggaagaccagtatcccgtcattcgccgctgtcacatcacacatcgtccccaacaccagctcggttccccccgacaacttgacccacgtgtatttatagtttttgggttctatcttctgcacatacttgaaaggtacacggtaagatatattcccgttctgcccgtccagtaattcgaaatccatggcctcgtcgagatcatacaccagcaccccttccagcgatagtccgtcccgtgtttccaccctcccggacaaacgttcgggagccgcaaaatcatcgtaaacaggaagattcaattgatcgagagggatggaacgaaacagcttgaagtcatgccaccccacgatcacctgcccgacagacggcaggttgatggctattccccggttcgtggcgttcacgtcgttttctccccacatgtaaagttccctgccgctatgaagggttaccaaggaagagtttcccagcgacttgatactcgctatattcttgaatgccacggaaaccccgctggattccgtccgcccgtcgagtaacgcacccagtgaattctcgtccagatcccattggacaagccccttgtacatcccgtaaggcgtttccacgatacccgcgatgggacgatctttcggctcggggatcgtgtcaggtgcggcggaaaaaacgatctcgctgatatggtcccataccacgctttccgtctttccatcccgcagttccacggcaatccagttaccgatggcaagcgaccgcccccgttcgagttcagtgacatttccccctttcacacccaattcaatccgcctatcaccgatcacccgaatcgatcgaatattcccgaaacgacaagagaattcatgctccggcggggtatctctccgcccatcactgaaacgaacgttatcacccataatatcccgataccgcatgtacgggttccctatttttcccgcagtgaaaatgtctgtccagtaaaggttttttccccacgtgatgtacccgcagattttacgattcatcaccgtagtcacttccccgtaaatccgtattgcccgactattctgcgcagacccgttagtcacgcaggcacaacagattaagcacccagttatccatgtttttaacataccacactatttttgtttattaatgggacgaatgaatcaggcgaaaagttacaaaacgaatgaagatatagaaaacaatttaaattaaaatccggctcaacaaaagagattaccccatgttaagtcggatttaaaataaattatattacgaaataatat

SEQ ID NO: 437 - DNA, 3784 bp, Butyricimonas faecihominis
tacttgcattgtatataaatttttaacttctaactaccccctctagctcccacttacacagggggagaactcgctacattgtaacattgtggcgtttctcgcgtccgtttctccccctgtgcaagggggagccagagggggtagtccactctaaattttaaactctaaattctaaacttttttcaatcctccgggaagtctacaatgaaatccagcttgtattataactctttccctccgccggcattacccggatcaggttcatgggtataatctcagcccgttgtattaccctgccttctcgcggcaggtagaagtgtcgggaaaatccctcgcttcttaggcaccccttcagaatatctcatggcaaagctacggataaattttaatacctgcaacgacaagtattaaaaagttacaggagatgctaccccttaacttgtgacttcatcggctgataggatttcccacaaatgttttttcatgtccacgtggccgttgggacggaaggtgaccccttcgttttcgagtagcgtccgttgttcggtccatcccggtgcggtctgtccggcactgttcacgacacggtggcaggggagcgtcttgtcgtccggggattgtgccattgcccggcctacccaccgggcgtgttgcggtcgtcccgccagcgcggcgatcctgccgtaggtgagtacttttccccgcgggatctgccgggtgatctcgtacacgtcgttgaaaaattcccgtaatgtttcgtccatattcaattcttgctccagcgtaaaggtattaaatttatcggtaacaatagctcgtgcaggctcgtttcgtgtcagggcatgaaggtggaaaatcaaggaacgcgcgggggtatacatagagccttttttcttgacaaaagtaataaataatggaattcctgccagttttcgtgtaagatgctggttatcttcactgtaggttaacgtcaccttcggtagtcattcggtaagtgttcgacaagtgttcgataagtgttcgacaagtgttcgatgtaaaagcgaacacttaccatgcatgatttggtaatttaacgaaaatttagtatatttgttgttaaggtgcctttaagcattgttggaggattacaggaacgtttaacaaggaggtgttatgaaaaagaagaaaaaaatcacgcggccggccggcaagcgaccggaaaccacccgttgcgacggggtgaccacgtactaccggaaaggtaaagtatgccattgcagtagcaaacgcccccccgggtcgagggaggaacgtgaccgccgccgcgccgcccgtaccttgaaccagcgccagcggtccagcgtgttcgccctcgtgtcgcggctcgtgaaaatcctcacgcgaaagctgcgggacctcaacgcgtgggtgtccctcgcgaaggcaacgaacatgactcccgcgaatctctgccacaaggtcaacggcaccgcgtgcgacgagaacggcgtggcgaacttccgcgcctttatattcagcgtcgggtggctcgccgtgccgctcttcacccgcgtcacccgtcgcggctgggagatcaccatcgagtggcgaccccacggcgtccccaacgagacgagggacaaggatacgcttgtcatcggctacttctacgattccttgcccgacgcgccccgcgtgcttcacttgcccaacgtcacccgtgccggacgggtagccacgttcacgctgcccgatcccgtgacggcaaccggcaagcccctctccccggacgagattgtccacctttatccctacgtggcgggttccgggcaggacgagttttccacttccgtctatctccgtgtcgcccgcgacgttgacgagattctagggtgagatcgcaccttgaatgttttcctagtttataaaccttataaaccctaaaattccgaggtaaagtggaacaccagtttcttgtaattcacttgcgccatttgcagcatgtactgtgattcggcgagaaatacgtcacgaccccacttgtccttggccatgtactgtgccttgtggagacggaaatcttccaattccttcgggtcgagagcctcgatccagcaagccttgtaaagattgatattttcccagcgacaggcggcgctgtactcgtgcagcaaacggtactcgataacctcgaactggagcgcacctacggttccaataatcttacgattgttgaactggttcgtgaataattgggccaccccttcgtccatgagctggtcgatacccttggccagttgcttggatttcatgggatcagcgttctcgatgtatttgaagagttccggggagaaactgggaatacccttgaaatgaagtttctcgccttccgtcagcgtgtcaccgatcttgaagttacccgtgtcgtgaagacccacgatgtcaccggggtacgcctcgtcgataatggatttcttggatgccatgaacgccgtgggggtggagaacttgaggttcttgcccaagccgacgtgcaggtagttggtgttacgtcggaacacgccggaacacactttcacgaaggcgatacggtcgcggtggttggggtccatgttggcgtggatcttgaagacaaaaccggtgaatttctcctcgtccggttgcacgagacgctcgtccgtctcgcggggaagcgggctgggagcgatttcgatgaaacaatccagcatctcgcggataccgaagttgttcagtgccgatccgaagaacacgggggccagttgcccgtcaaggtatgcctcccggtcgatggcggggtacacttcccgaacgagttcgaggtcttcccgcaacttgtcggccgagcgttcaccaatatgctcgtcgagttcgccggaattgatgtcgttgatctcaatgccatcctgaatggtctgcacgcttgccgagtagaggcaaaggttctcgcggtgtatgttgtaaatacccttgaactggtcaccgttaccgatgggccagcttaacggggtgacttgtatttgcaactctttctcgatctcgtccagcaggtcgaacgggtcctgaccggggcggtcaagtttgttgataaacacgatgaccggggttttgcgcatccggcacacttgcatcagcttgcgggtctgcgtctccacgcctttcgctgagtcaacgacgataatcacgctgtcgcaggccgtcagcacgcgaaacgtgtcctcggcgaagtcttggtgaccgggggtgtcaagaatgttgatcttcacgtccttgtactcgaaacccatgacggaagtggccacggagatccctctctggcgctcgatctccatgaagtcggaggtggccgttttcttgatcttgttcgacttcacggctcccgccacgtgtatggcgccaccgaaaagcaataatttctccgttaaggtcgttttacccgcgtcggggtgactgatgataccgaacgtgcgtcgttttaatatttcttccttgaaacccatgctgattacgtgttttttttagcgggtgcaaagataggaaaaggaattcagaattgaaaatatggagggataggattgaaaataaggattatttttcttaaatttgtggaatatggggcgtttcgtgaggtaaaagtgtaatttaattgcaattatgagaagatgtatttttactatcgtaatagtaggttttatgtgtggatgcgagaatgtttttgatgatgctatcttgagtatggatgaagagaaaataggcttaacaagtaattccgttattcctcctc

SEQ ID NO: 438 - DNA, 3776 bp, Butyricimonas faecihominis
aaatggtattacatatatttaatctgcaccaatctttcacttcgccatagacgtctcgatcaatttcatgttatttcaacaactgttcttgaatgatttcctcacatttctctggttggtatccttctagtaccgttggttttccacttactggtactaaaagtaacattggaatcagttttacattgaacaccgcacaaagttctttttccttgtccacgtctattttcatgaacaccacttggtctttgtacctctcggccattttttccaactcgggcatcaattgcatacaaggtttgcaccacgttgcccagaaatcgataactatcggtttatttcctttaaatatgaactctttatctttacgataatcgtaaagatgctccaaaaaatactttcggttaatcgagttcaatttgccgggcacaatttcagtcacgacattgtccatcccgtcattttgcaccttcaccaaatcaaatggttggaaataaagtttctgctttttgtaatcaatggtgacgattccttttctgagaatgtcggatcccagtatggaacggggcagattttcgttcttggccacgaccacttcacccaactcctcattcacgaaacgacctttagcaacgaccttggtggcggtagccttttccgtcggcagatatcccttcgtaatggatgccttgccaccttttttgccgtttaccttggcgaaatcttccggggtcatggaaacgaatccctcgttccaagtgtctaaaactacaggaaaaacttcttcatccaatattatctcacaagcgacagtcgtaccggctactagctccatcttcatctgataatcctcttgcatgtaagggggggcggtcggtgttgatacggtcaatttcttgcgttgggtgtcgatcgtcagtacttttcctaaaaacatttcgccgccaagtactccggctatgccaagtttttgaaaataaggagcttcttccaacacgcaagcggtgagattatttgcgtaggcaacatttcctaatgttacccacccgaaagtctccaatcggggcaaggacatatctttgtacaagaaagtggaatccaatagtcgatgtgctatatgcttttcggggtttgcctcgtccacatatttcgacaaaatggtcgtatgcccagctagatcgagtgcgaacgggaggaatcgcccgtttaccatcacatccacaatcattttcccgtccatttcacggtaatctaacacctcagtggcggtgttcttcgactgcgcaaatcccactactgaagtaaacgacattgccaatactataaataatttgcaatacatattctttcttcctctttaatttactaatgttgcattacctattgcctgcaaatcaatattataattttctttaaggcaatttacaagcaaatcatacttttttcgaatcaaaccgttcttatcctttttcggatttagaatcccattgtacgaattcggcgtcgtatcctccgccatcaaatttgcatacggagtcgaaataatggcagtaataaagaatagcgcatcggtatctttcgaggtgttataaaacaaacagccttgctcgtatgcgtttgtggaagtcaattggttataattcgacacttcgaagaaagcgggatccactgttatcttggctttgtacatcaaacgtctcaagaatccatcattcgtttccactcgaatcgcatttttttgtgcgtcagtcagcgtcaagaccttctcattcccccagttgaaggccaaacaatcataaccactgtacatattatatgttttatcgaataatccataaacgctgtaatgatccaattggctacacagcaaaatcttcagtggcaaacaacgcttcaatgttgtgtccgagtaaaagcgcaagaactgttcttgaatcaattccagttgttttcccacatacttctcgtcagcaactgcagctttaaaaccacctgtagatttatacgtaccaccattctcaattggtgtttcctctatccatttgactacttcccaatacaactctttcaattcaaacttatatagagtgaacgtgttgaatctctctttccaatccacgatcttatcatcataatcatgattaccttgaggtacagaatatccgaattccggagtctccgtcggggtcaatgtctcttcctcgtgacaagcaactgcgaagatcaccaataacaataaaaatattcttcgtttcatatcttctcttaacgtttattttgtgttaaataagtattattatccatggctgatggtggaattggcaacacgtagcggggatcaccctcttgtaaagtgaccgtttcctccaatcctttctccacaaagtaaatgtgagtcaactccggcatcccgaaacggcgtaagtcaaaccaacgatgtccttcaaaggccaactcgcggcgtcgttctttttcataaaagttccacaaatcatccttgtccgagaagtccacatctttataagctacattttgcgtatcaaaacgggtggctcgcaatctattcagatccgctaatgccaacacccggaactcatcgtttcccgtctccatgaattttcgtatgtgtgcctctgcccggttcaaatacatctctgccgttcgaataccaaaactggcataattctggctcggtccgcctttatacccgaaaatataacctacaaacattgtagtaaagtccatcacgtattgataatatgcgggcaagcgcaaatcgccataattgtaataccattgacccgactcggtatcatacccccaatcattatattcatacaaattctgcaagtcttcggaaatcgagaaaggcgggattgatccttgcaaggatggaaaacaagatgagaatgttttataatcaccatacatccaaataatctcatcacttacggacaaattgtaaactgaccaagttggacccataaatcctggttccatcatccctgtcggcatactcgcgaaggaaagtaacgtcggctttttctttaacaccttattcgcatattccaacgcgtggtcccaatcctccatgtaaaggtacactcgacacaatatcgcttcaccagccaatgcattaattttatacaaagacatatctttaggatgttcctctaataattggattccaacctccaaatccttcacgatctgatcatatacctcggccaccgtattcctcttcataaaaccgtcgtttacgtccatcaccaatttcaagggtactcccaagttcgtcttggggtcgccaacattataaggcattccatagtaattcaccaacaagaaatagtagtaagctcgtagcacataggcttgaccgcacagattgttctttacctcttgagaaccgctcactttatctatatagcctaaaattgtgttacagcccatgatcttgcgatacaaagctttccaagaattatacccgtcttctgtcaatttctcgaacatatcgtcttcccaaaggaacagggagcgcatgttgtccatcgtgctgatcattgagccatcgctacttgatccgttacattttacattgtcagtcaatagctcggtataaccgtactccaagaaattcatcggatatccctcgccagtcattacctgcatcaaatcctccaccgtcgacggacggatctcgtcttgactagattcttccaagaagtcgttacatccggcgacccccaacaacaataaaaacaatagtatatttc

SEQ ID NO: 439 - DNA, 3760 bp, Butyricimonas faecihominis
gaaaaaaatcctagttgcaattctgtgtttaatctttttgggagcttgtacccagaaagatggaagagatcaaacggggaattctgaaaattatttggaattgtccgtacgctccggttctgctggtatgacactagtgacgatgccggtgaacgtgtataattttaatggattatcctcgaatcaagtttgtgagccggactattttacggctgaagaaaaaatttcgtatcaagatttattaccggggaaatacacgttttttgttttaggaaatgtgccggttaaggagatggcgtctctctatctcacgggacgggaaatgaaagatgtgaatttacgttggatgtgggattcaattcctgaactttttggggggattgcctatgtggatggctcagaagagacaaagacgatcgaaatgaaacgtctgattggtaaggtaaacgttcatgtgacaaattcatctgaatttcagactgtcgaattggcgttacagtgtgatacatatagtgatacgattcaaatcgaggattacgttcttcgaattcgcacggattacggttttggaaatctaatggtggataaagatatttcgttttttcccacggagggaccattgagagggactattatcgctttggatgagagcggaatatattattttgattttgtcgctaagaatcgtattcaacgaaataagagattagaattgaatttaacattgaacaaggcttcttctcttggtcgttccgcaaatgttgtcaatggagcggtgacttgtgtggaaaaagtaacggaattataatttaataagatagtgagatgaaaagaatactatatacatttattatattgtcaaccgtttggtttacaggttgtcagaaagaccagcttgacggggagatcccggggcaggagattcccttgacttttagcggtcggtcatccaatttgtctttagaagctttatcccaggaggtgaatgctttgcatttgttgatttttaacgaggatgggactttaagtcaacataaacaatatgctggtttgaaggatgttaaaccggttaaattagttttaggaaaatatacttttgcttatttatctaatattgatgaggctcaaattagtggaattgaggaaggaaaaacgctggaggatgtgaccctttcattggaaaaagatactgatggagagaatgtgttgcccggtagcatctttgccggtaagagcgaggtcgtggttggggaggacaagacaagtaatgctgagttgagtcgtttggtcgggaaattagatataaacgtagagggtatgaaaagtggtgtggaagttaaaagtgtaactttattgggatcaccggaaaaaattcgttttgatggtagtgccgtgggtgatcccgtgcggttgaaagtcccgatgaaagaacaagggcaacaactagagggtgaggcgatagctttccctacgtgtcaggatactcttgcccgtttagaatttcagatagaggtaaacggagaaatgcagaattacgtggttggattaaagaatcgggtggaggcgaataaaattcacacgattaatgcgaaaataaacgtttcagggggactcgtgaacgtaacgatcgagatggatgtggaaccttggggagaaacggtgtcggaagatctttccgtggatcaaaggaaattcgtggatacattgaccgttaaattattgatggagactggttctcccgaggatttgcgacaggtgagagccttgaatatgcattttttgaaaaatgatggtgaagcccatgaattttcaatcaatgttgatagttggaattcggaaactttaatggtttggagtgaagatacgcttgtcgtgacgcattgtaatcaggtgcttcaagggaattattccctagttgcaatttcattaagggattcatccggaatgaatatgtatgtattacagtctgaagtcgaaaatgtaattattgattcaaccggaagtgtggtgattgtgctacctaaaatgaaagatattgcagcgggtgacttgcaggcgatgttggaaattcgggaagctttgagagcggcaaacgtcagtatggtagataattgggaatcagataatttgaatttgtggcataatgtccatttggatgaaaatggacgtgtgatcggtattggctatcaagaatgggaagacttcttggaagattatgaccaggttgacatgacaaagaaggcatccatgaaagcgaatatattgacccgaagtagcgaggagtatcctgtttggagtttaccggagtcatttaaaaatttaactgctttgaagtggttcaatatgggagagtcatatggtagtttggcggaaattccctcttatatgaaagaaatgaccgcgctggaagaattgagtgtgaacacggatgcaacttctcttccggaattacccgctaatttgatttatttgaacgttagtagcttgactttaactgcgataccgacacatatcggtaatttgacaaaattggaaggtttggtattcagcgttccttacgagaatgatgatgaggaaatcggtgattattttccgatgctttcgaagtctcgaattacttctgcggatttggatttttcaggattaacgaacttgaaatatttgtatcttgttgcgacgccttcctgcgaattgcctgcttcggtttggaatgtgacgagaaacgtgattgaatttgcaattgccggatttcgtaatttacaaattccttcttctgctgatttctcgtctattcgggaattttccgtggctaatgaaaatatgttaccagcggatattgagagaataaagagttttcaagtgactcgtttaaggttgtattctcctgttttcgggaaaaatggattgccggattggatgggacaaatgaactcgttgaagagtattacactggatagttgtggaattacttcaatcccggaatctttcaataatttaaataatttggaggatttatatttgccgaggaatccggaattgacaggtatattacctgcaggtttgctggaggtgtataattcgggtaatttgtatgttagtgcttccgattctcctaattttagtccggatgggatcatgttgagcgtggataataatttaataatggcgcctgcggaaggtggaatatattttgtagaagtccggtcaaatgcagaatggacttgtgaagtcttatgggcggagtatgttcatgtcgctttacttgatgggaacgagaatgtaacagattcgattgtcgggggaaatggcgtgttgactgggcgaggaaatgccagattgcgggtaaccgtggacccgaataacccgaataattattggccagaaagaaatggagatattacgattcattcggggcggcatgtggcatatattaacgtggtgcagaaggaaatgctggatcccgtgctcgatgtttcccagagcgtatttactgtccgttcgggagatacgatcgtgtttgacgtaacctccaatatgggatggaatgtagatgtgatgacaatttcaggtgacgggtggatggatatgaacatgtgctatggagaaggaaatcaacggctggaatgtacggtacatgctaatcagtcaagtgtatataagatcattattactgattacaaccagtttaaatcagcggaagtcacggtaaacgtggaaccggattccggagagatcccgcgagattcgacaagaataaatt

SEQ ID NO: 440 - DNA, 3758 bp, Butyricimonas faecihominis
gaatgataagtgtctcgatattataacgcgaataacagttgaattacataaagatgatgattacaaacagaaattgggatcaggtgtactttattttaataagcagttagccgggacggtatatctcttgacagccaaacattgtctttctggattcaaagaaagagaaaaggtgtctctaaggttttttaacccggaaactggcacctacgattatattaccccagtaaagcaaaacatactgctccatcctattgatgatgcaggaattgtcattctcaaccagcgagaactttctacgatagtatccgaccttccaccagtatttattatcaataagaatgttggttttgacgaggccgtgaccaaaggatttcctattgcaagtcttgaccagacaagcgaaacaggagagtcttctttagtaacgcttaatatgcgttacctccaggaaatcccgactgaacacgctttccaactctctacacttgacgactataacgaagattcaatcaagggaatgtcgggtgcaggtattttcattgaagcgtgtgaagagttgtatcttaatggtatattcacccgattcaccgatgaagatagaggcaaagtcatctatgcccaaaagttgacctcatttaatgagttgttggggaataaatacaaaaagaaaatgcctttagcattccttggacatcatggattaggacacaagacatttgaaaacagcgtaaaagaatctgtggcaaatctgggaccgaggtattgtcaaaaagtcaatgtgaaaactggaacagcgaagtattttgatagcgtagccaaaactccagattattataatagattgaataggtgtattgacgcatggttgactgagaaaagctatagaactagagatgattccagtagaataggtcatttggaatctaacctgaaaactataagaaacgacttcgttgatgccttgaatggactggataggagagtgcaggaaataattgacttttctattttgatgaaaagggtggaaaacctacagaatgaattagaggatgtccgtcacaaattatattctgatttttcatcaatcggtaaagatgaaacgtataaaaaagagttggaaactgatcaaacaagattatcggaaatatcaagtgatttgcgtactttcactgaagatgttgaagatttaaagattagtctcgcaaacaaaccttatttgattatcaaaggcgaagctggctgtggcaagtcgcatttaatgggtgatatagccaacaatagaattgctcatgggctacctacattgttgttccttgggtctgattttgctgaaggaacttatgaaactactattacatcaaaaatcggttttactggtactttccaaaaattcctatatagttttaatcagataggatgtcaaattggctctagagttcttttaatgattgatgcgctgaatgaaggcaatcaagcaactttatggaaagaaaggctgccaggacttatcaaatcactggaggtgtatccggcaattggcttagtagtttctgtgcgagatacatactttgaagatgtaattcctgaaagacctgaaacaagttgcagtgcgactataattgaacacaaaggttttaaggggctagaatatgaggcggtgagacagttctgtattgcatatgaattgaatttgccaaatgtgcctatccttactccggagttctgtaatccactattccttaaaattgtttgcgatacacttgaaatttccggagaaaaagattttcctaaaggattcaatggcgtatcagcattatttaatcagtactttaaaaatcttgaccaaaaattctctgaaaaaagaccggaatataaataccggaatgttgcgagcacttcagtccgattactagccattccagtctttgaggcaaaatacaaccttttgaaaaagcaagatgcagattcgatacttcaaaaacattttcctgcttgtcctacattattagcagatctcattgataacaatgttttactcaaaacgaagtcacaggcaagagaagaaaatgaagactgtgttgttttctgctatcaaagaataagtgattttattattgctagagtacttgtacaacaatatcaaaactgggaatcattcgcaagagtcatcaatacagataatgttttacgtgcaatttttgtagaatcacactggtcttgtaaggggattcttgaagcccttgctatcttaattcccgaagtatttggtcacgaagttacggaccttatcaaattcatcccaaaaacagaactcaaaaggaaattttatttatgtttagatttaatttcggatgcactgataaacagtttaaactggcgctctatagaatcaataaacaaaaatgcgataaggcgttttctcaagtctaaattgtgtagggtaggatcagataattggcattataaactagtagagctttcggttattccaaatcatccttttaatgcggattattttcatgtattgatgatgcgtttgacaatgccagtacgtgacggaattttccaattctttttcaatgggtgtgcaggatataatgatgataagtgtgcaaatcccctgaggcggctgatagattgggcttggtctgaagatgtatcgcggaatgcggatgcggagtctacgagattgaccgcaattatgctctgctggttgctatcatcgacgtatatcaaacatagagatgaagcgacaaaagcactcgtcaatcttctttcggagaaggtggatgtgttgattggcatcatgcgttcattcgagaaagttgatgacatgtacatatacgagcgtttatttgctgtggcttacggagtggttttacgaacttcatccagtggcgaactgttaaatctggccaagtatgtatatgacacaatctttaagcacaataatcctcctaagaatatcttgctacgagattatgcaaggaatataatcgaatatgtcagctatacaatggagatgacttctatcaatatgaaaaaagtgcgtccaccgtattcgagtgatattccagtatggcctacagatgatgaggtaaagcactttcatattgattacgaagtacctgatttcaaggaaagaaaaggtttcgaacagaatctgatatgggaatcggtaaaaggtggattggctgacttctggaataagcttgcatcaccggtaattgaagacttttacccaattcagatttctgaagaaaaagcgtataagaaggcacagcacctcttcaagggtgatatgaagaaggtggcgatactatattccgaagataaagcacgcactatcttgaatgatcaaactgcttctaatagaaaaacttctcatgacaatttgcttgaaatgcttaataagagtttcgaacagatgatgactaaagaacaattaaaggcaatgaatgaggtaattattccttttcatctcaaagagttgtctttgcggaatcactattctaacagattcccaaccgatggggcaagaaattggctggtaaagagagcctatgaattaggatttgatgtggagttgcatggtcggtatgatcgtttcgcgaaagattggacatttagacattcggaagacaggatagacagagttgggaagaaatatcagtggattgcattctatgagataatgggaattttatctgataattataaatttaaggatgattatgcaagcaatggttatggtg

SEQ ID NO: 441 - DNA, 3735 bp, Butyricimonas faecihominis
ttcacactcttctgatctaaattctctataatattgtttagatagctaattacgagataactcgctttccacatatcctttgcaatatattttgccgattgacttgcaaaattcaatgtagacaaatacctgtaagttccatcatccgtaacaaaattttgccccaacaactccggtatcaacacagacatatccccaccatacatatcctccttcaccatcgacatatacaccccatacaacgcatcctccacaccttccgccgtactgaacatatcatcgttcactacctccgattcgggatttatatccaagaaatttccacatcccaagaaaaataaagagacacatgccaataatattcttttcatcatcatcttctgcctttagtagttatcaaaatgtcggtctaaacgtgatatggaaactccgttgaaaaggatattccgtacctcgttcctgtttcacggaagagaaccgggcaatatcggcaacgcctatgcctagattcagcctcttaatcccgatcttgcgcaaataaccgggtttaaactcgtaattcaacatgatactcgttatcgcgaacgtgttatcccgttccacgaaacgctcggaatacctattctcatcactcacgttctccggaatcccgaggaaacgcactaagtcgcccggtttcttccaccgtttggtgaaagcccgacgatccacattcccgtagggatcaatatactccactttattcgccaaagttgtgttgtaaatatcaccgccaaacttgtacgccgcggtgacattcaacgtgaatccccggtacgacaagctcgtgaaaagactcccctccagcatgggattcgtgtttccaacctccactcgctcgttcttatcgtaagtaaacgtgtaattcccattcttcttgatatacacctcctgcccggaagccggatcaattcccgcagaacgcatggcatatataccgaactgagatcccccttccacgaacatcggctgaggtttcacgccataataagccgccatattctccgccttcaacgcatccgagatactcgtcagtttatcaaacacgtgcgatccgtttaccatcaccatccaaagcaggttatttcgcttgaccacttgtgcagaaatggaaaactcgtagcccgaattctgtaacttccccatattcaccaacactgaagaaacaccgacagaagacggtaaggtcaaaggcatcaaggcatccttcgttttgttcacgtagtaactggcctccacgttcacccgttctttccagaaagtagccgtcaatccccaattatactttcgggtaacctgccatttcatatcgggattccccatcgtgatcggaaccgcacccatcccgccataatgaattaagtcggaatcataaagataagtggtcaaagcctgataaggcgtgaaagtcacgttagccgtcgaaccgacgctaaaccgaagacgcaaaacgttcaaccaatcgaaattcatgaatccttctttatgcagattccaaccgattcccgccgaccataccggggcaaaacgatgtttactgccaaacttcgacgaacccgctgtcttgtaagaggcattgacaaaatatcgtcccagcaaatcaagactaccgttcacgaagaaccccacctctgccgattccttctcgccacccacgggacgcgtagtcgcgtactgcgaggcaaatttaatatccgtcatcttgtccttcataaacccttccgccttcacctgcatcgaagaagacttgtccttcccgatgtccgtacccgcgctcaaggaaagaaccgtagtcccagcatcattcagcggtaaacgataattaagtaccaacttccccgcccaatccgtcgtctcggttgaatatgccgtgtaagtccctttcttgttttgaggaatctcctgcaaggtgaaactcgcatcctccggggaaacatacaccttattccacgtgtccccctgtcgcacactcacgtttcccgtgataaacagggtctcgttcatatcccagcgtaacgacaaataattcgtgaccgctttattctgacttttcgaaaagcttgccagcgtggcattatacagtggattgacttgccgttccattgtccggtttaccggatcgaaataataattccgtatatactccccgtccccgtcatataccgggttgtacgggttcaacctcgtgtactgcgcaaaactcccgtaaggactattctttccctcggtcatggtataagccaactggtaagtggccaccacatcccgggcaaaccggtacgacaaagaaacattcaccccgtaattccggcgataatcacctttcatcacgccgtatgtatcggagaaccgtcccgttaccttatactcgattccgccaccccgccctgtcatcgtggcagaatgactatgcgtgaaagcattccgcaaaggtttcgtcgtccaatccgtgttgacaccccggcggatgttctccagcttataatcataagccgggtcaagactaccatctacccggtcatacaatcccgccaaacgctccagttccaacttttcctccgcatcacacaggcgaagagaggtcaaatcgggaaaactgaacatcggcgtgaaattataactgaatctcggcttatccgactttccccgcacccgttccaccaatatcaccccattggcagctttctccccgtaaagtaccgccgcggatgcatccttcaacaccagtacctgttctatatcgtaaatatccagatcatacaaatcctccacggaaatctccaccccgtccagcataatcaagggggcatttaccccttcctgtccttttgtcatgattgaactcgccccacgaatcagaatctcaggcacgacgttcggatcagaccccgcctcgttattctctacaatcctcaatcccggtgtcaagattgccaatgcctgtaacaggttcgtcggggatacccgcaacaaatcctctcccttgatccgggtaatctccccggtaaaagcattcttcgcctgcgtgtaatacccggtcacgatcacatcatccaattctttcatatccttcaccatcgtcacccggatatgccgggtactggtaaccgtgacttcttgattcttcatcccgacaaaccggaaaagtaacaccatctccttttgttccggaatttccaatcggaacttcccgtccgtacccgtggcacatcccaaagaagtccctttcaggacaaccgtcacgcccggaagtggttcgccatctgcatccttcacctctcccgtgatcacgatcaaggcagaacgcgattcacccgccacggggatttccggaaaacatatgcagcagaacaacagaatccatttcacaacaccacataagttgccgtcaaacttcaataccaagtctactctcatttaatttgatcttttaataccatacgtgcaagatatgtttctatcactttattgtctaaacatatccattcgcacctaacatcattcatcgcaccatgcggtataaacccgtaaaatacatcatcacaccatcattgctacctgacgcgaaccctcaactttatcattcacgttcaatcgcataatttaccttctatccctgttttctacaactatttcaaaacaaggggaacaaaagtaataaaataaataaaaaatttcaatcaagcaagtatcgat

SEQ ID NO: 442 - DNA, 3727 bp, Butyricimonas faecihominis
tttataatttcattatatttgtcccgtgaaataaaaggacggcatttcaaattctaggaatatgatgaatgacagtatatcttctccaatattttggatgtatttttcgtacgtcctttcttttatcattcccctattttgcggcctcacgctgttaacagtcaaaggggccgtccccagcgaacaagccggaatgcatccacggaggctactgggaattattttcacattctcggggttgatcttcatcccgaacatgatacaagatattcataaatatatcacgggtgaactgggcttacccatctttgatattgtcattaacttgtttctggttcccctgtattttttctatttccgcaagctcacgaaaccggaaaaactgacatcccgaagaatttggccacacttgatgccgggaattttggtactgattaccagtttctttttgtcgcctctgcaagaaaaaattgcgggggacggcgtgttctttaatgccaacttacctttaattattttccgttgcgccagcctgatccttcaagccatcatgatcacactatacacgtttcgcattctgcatttgaaacaagaacatatgcaacgactggaagagaattattcttccatggaaaacatcgatttacactggctaaaccaagccatccctttggctgtatttttcgcatttgtagctcttttcgcatcttgttttcaagccatctggagcgattatctattccacatcagttccatattattcactttttacttgtttatccacgctctcaacgaaccttatatctgttacacggagcaacacgcggagattcatgaagaggaaatcatttcccctaattcctgcccggagccacctgtcaccgctccaacaagcgaaacggaattatcccccgtttttcccgccctacccgagaagtatttgaaaaatctcgggatcaaaagagaaaagatgaaggatgaactcgtccaccttttcgatgaaaaagaaatatacaccaacgggaacctgaccatagccgacgtggccgccttgctgggaacaaaccgcacgtacgtctcgaacgttatcaacaacgagttcggcttcagtttctaccagttcgtcaacaaataccgaatacagaaagccacgattctattaattcaacacccggatatgcaaatccaggaagtagccagcctttccggcttcaattccctttcctcattcatctctgccttcaaattcaacgagggcatcaccccaaaacaatggaaacaacgttacgtggaccccctttaacaatttcgaatacgtaaaaattttggaattcgtacaatccacgaccgaaaaggtaaaattataacagaattttactttttactcatctctttcgtgacaagtctctcacatttgcaaaaaacttaaatgctcacgatatgaaaaaatttattctatcaattcttgccatagcagctatggcaagttgtactaaaacatccgaagatgacgttgatcctaatgttccggtagagattaaattcggagctggtatcgatatgttatcccgggctgccatcactactgacggaagcggtcatcctgtatcaaacataacaagcatacaaattctaagaggtacagacggagcgaatcccgcatttaacacgatttcagatgtaacaaccacagctgacttaaaaacagatgggacatttgaaaacatcataaatcctcaatattataaatcaacaacagatgcagcaaattttattgcctattggccacaaggccttctcacctccggaacagtcaattttacgataaccggagaagaagacatcattgtcgctcccgctatcgcgacaacttattccacgacaccaccaaccgtaaatttccaattcgcacataaactagcccaacttcaattaaaggtaatagctcaaaacgaatctgctttttccttttacggagtactagaaagtgccaaaataaacgtaccttcaaaattagatatgacaattaaagcagacggaagtaccgaattaaccgcaaacgcaacccccacaaatatagatcttgattttggctctgtcacatacagcacgacagaaacctctgcatccaaaaattttattattttaccagtagccccaacaactatcaatcttaaatttgccaatataacagaagcaaaagattacgatatcaaggatctagctttattacccggaaaaataacaaccttaacaattacagtaaacgccactggagttaacttttcatccacaattacagaatggactaccggaggaactgacgggaaaacaaacgttggaggcaattaaggaataatcaaaagtatttaatcatttcctacactaagagaccatgatgaatgtaaaagcatttatcatggtttcttgcttttgggccacaatttaagttaaattccctattgaggcacttttcctatttcacgatattcactataatcgtgttgtctgtctctcctcgatacaaaatcgccaaagtttttcctatatggtaaatattcgttatccatccacgtattcactcttaaaccagaattcgaatacaggatcaagaaaataaaaaccttccaccgttttatccaaaatatctttttgttctaaaacgattttatttttcgacacgttttgcggcgttcccaatttatacttggacatcgtcgtcgctcccgtaagaattgactcccccttcgctatagcaatcaaaagattaagctgggtaatggataaagcctcacattcggcaacatacaaaggcaaatttgtattcacgatttgcgaaaacgccttgtcaacaatttctacagtcactgccttccgagttgcactccacacgaaatgagataactgttgcacgtaccaagaatgagatttcaccttctcaacaatcaatccggcatcctctgtcgaaatctccttccccgtccgttgaaaggaattcatgataaattttatccattcagtttcatctattttccggagaaacatcaattgtccaaatcgataaaaaggcttggaagacgaattaaaaatttcgatcatcatgtgccgtttactaccatacaaacaataactaaccttttgatggtgttgccacacgctacgcatttctccttccaaatgcccataatttttcaatcctgccaaactttgaaactcatctatacaaacaataattttaattcccttggaacaagcgatcttttcaggaagttctaataactcccgttcattttctttcactctgtgatattctagcccgatagaaaaatcagtcatcggatcaacaccgatagatattttcggagagagcgtttttaagaattccgtagcatttgaaatccacgtttcccaactattactagtagctttgatgacctcttttgcaaaaagttgataaaactcctcctcacttcgtaccgtaaagacatccaaaaagcatactcgcacatcaggacgttcttcaaccagctctttcatcgcttctttcaccaaagatgattttccccagcgccggggggaaatcagcatcgtgttaatgcccgaatacaagttacttttaagttcttgtttctccctaaccctatttacaaaggtcgaaccagcggctaatttcccgtattgaaaaggtgaatccaacataataattgttttctacaaatgtaatgag

SEQ ID NO: 443 - DNA, 3721 bp, Butyricimonas faecihominis
gcatatagtttttattactacatttgtgttactctgttcatgtacaaatgaatatgataaagttaggagtaagagtcagataaatagttttgtatgtttaaatgtattgcagaagggtttaaaaagcgccatttgaagaatatagtggtaaaagatgaacgggtattgtcgttttataatttagatacggccaaaaaatgtgtcgtgttttgggtagctggtgatgtcccggtgtcttctgtcaataaggtgcgggaggctctggctaaacatatggacgtttgtttgcttgcttttatccggcagcccaagttgaatacggagcaaatacaagatgctatttatctggatagttccggtatttcttaccggggagaatttcgtgatccacgggtgcaggaagtcgtgaacaggaaggagggactgttgattgatttgtcgttgaaaccggatgtgtggggggattatatcgtgaagtcggccaaggcgtcttgcaaggttggttacggtacgggacatgatattgattttgacggggtgcgggatatagatgattttatggagcgattgtttaaattattaactaagataaatacgtattgaaatgaaaaagttttcgggagtaggggttgctttagtgactccatttgacgaaacgggacgtgtggatgaacattctctgaggaacctggtgaattacgtgattgatggtggggtggattatctggtagctttgggaacgacgtccgaggcggcaacgatgacagcggacgaaagagcttttgtcgtgcaagtgattgccgaagagaatgccggacgtttgccgattgttttgggaatcgggggaaataatacgaatcaagtgatccatgatcttgccacgctgccttatctgcggttgggagatgccattttgagtgttaccccgtattataataaaccttctcaacaagggttgtataatcattttaaggcgatagccgagcatacacctcttcccgtgatcttgtataatgttccggggcgtacgtccgtgaatatgactgccgcaataaccttgaagttggctcgtgattttgagaatatcatcgccattaaagaggcttccgggaattttgaacaggctacggcaatcatttccggtatgccggagaattttatcttcctgtcgggagatgatggtgttgccttaccgttagtatctataggggccagtggcgttatttccgtgattgcaaacgtgatgccgggtgaattctccacgatgctacatttggcattggagggcgagtacggggaggctcggcagattcatttgcagttgggtgagatgtttaaagctctctttgaagagggaaatcccgcgggaataaaagctgcgttacatgccagaggcgtgattgcctgccagaagttaagatctccgttatgcgaggtgagcgaggccttgtatcaaaaaataaaacgattaggtgagtaatcacctaatcgatacgacccggttgagagcgtctcaaccgttttcttttatattccctgtattggtatagtccgataagtaataccagcacgatgggcaggaaaaagttggtatattttaagaatcttctataagagtcgcttactacttttagtgactgattctcgatatatttgtttcttaatttaattagcccggaatcgtcagccagccattcaatggagtttacggcaaaattgatattactgatatagaacgggtcaaagaatttatcttccatgaaatcggcatccgtaatgacaacaatagcactgttgttatcttcgttgcttaataatgcggcaacggtattgttgggttgattaaagtcgtgttttcttgtccaagttttataaatgtcgaagaataccggaactttttgcacgcctgaaatggaagatgattttgccaacggggtgaacgtgtaagcggatgtcgtctttacattcgtgatactactagcaaattgcaatagcatggcattcagtccttttgtgatcacgtgagaactgaagttttggatgataggtatatacgggaaatggcggtcgctttggagttgtagaaatccttgatcctgagtgaccagtatgcgtccgcaatagttatccacgacgaaatcatagttgatttttagcccgaattcttccagcatatcttctatgccgacccggttgatgaaaccgttattctggctgtaactgatttgtccaaccgcatgattcaaagcaatatagagtcttcccccttgttccaagtattgccccaatcgaacgagttcttccttgctgaatgactctttcggtcccacgatacagattactttgtagtcattcaaatctgtaaactggtctatgcgcatggattcaatcttggcactatgggatagctcatgctcgattaattgagttttttgtctcaacatttcgttatggccacgtaagaaaccgatagtcggtttcgtcgtgtcgcaagcttcttttaaacggcgggtaacctcgtattctagcgccgtggtcgggagaatgtttattgtctcttttttgttgccaatctggatgacggctccaaagtatactttttgaattttcaccatgtctctctcggcgatttcctgggccattggttctatccctagttgttcagccagagcttccttgtcactgttgttcggtatgatcgtgtttatggtgaatgctttgttactgattgtcttgtactctttcagcaagtgtcggaattctcgtccgagttttattttgtcgggcgtgagaccttcggacatgaatagggtaacggaaatatccttgtcgatttttttgatcatcgttttgctgacagggcttaaagaatattttttgttactcgtgaggtcgatcctgataaataggaaataggaaataatatttaccgctatcagtgataaaatcaggtaggtcggattatatatcaatttctttttcatcactttcgtactaaatattaaaaccgatttttacagatataatgtcttgctaatgctaaaaatataataattaagctgataaagtatatcaagtctttcgtgtcgatcactccgcgggggatggcatcaaaatgttctccaatggagaggtacgtgaataatgctgctataaatccggccccccagagttccgcaatgaattcaaacaaaagtacgaatccgatctcaatagcaaacgtgatgaagaaggccacgatcgtgttcggggtgagggacgaggcgaacatcccgatactgatgtaacatccgctgaccagaataagccctaggtaaccgcaaaagccaacggcatgatcaacgttacccagtgaggcaatcgtgatatagtagggaagtgtcaatgccagacatataactacttgtaatagtatagcaaagaatttccccatgattaactgccatgttttaatcggctttgagaataagagttcgaaggttccgtctttgcgttcttctgaaatgcttttcatcgtgagtgccggaatgaggaaaaagagcgtccagtaaaacacattgaacaggttgcttagagaagcttgtccgcttgaaaagatgtttttcccggagaaccagcaagcgaatcccgttacacaaaggaaggccgtgtatgcgatgtatatcaataatgaattgaatgctacttttaattctttgtttattataactttaactgcacc

SEQ ID NO: 444 - DNA, 3709 bp, Butyricimonas faecihominis
atatattgcctaacaatatttgtatttttctaaaaaaaggtaacgtgtagatgttagctcgggaaaaaatgagagacgaactcaaaagtcatgctcaaagcggcaaccttccctaatccctccttactcggaagagggaaccgcttggtaatcaacccttcccctgtgtaagaggaaattaaaaactaaaagataaaaggtgtcggctcgcacactggaatctaaaattgacaaagctattcctgcccatgtaatttattaaataaaatggccaagttcgtgtatatcgtcgtgttctgcacggcaatatgggcaggcactttaatccgggccggggtaaaattccaaatagccttaatcccccaagcaaccattaaatcggccacgttctgggcacattcggccggaacggtaatgatacctatcgccacgttacattctcccggcattccccggaactggtccacgtgaaaaatctcgacatcattaatcttggtcccgattttagacttgtccacgtcgaaagccttctgtatattcaacccaaaatttctcaatcccttatcctgcaacaaggcacatcctaacgaacctgccccaaccagaaaagcgttattaatcttgttgaaaccaagaaagtcatccagtatctccacgaaattatccacctcgtaacccacacgagttttaccggagataccggtatgcgacaaatctttcgtcacttgcgtggcgtctatttccatgtattcggcaatccttgtcgatgagacgtatttctctccctgcttttgcaatgtcttcacgaaagaaagatacgcgggcatccgtctcaagaccggaactggaacaactttactatcattagccatataacgttctataatttctgcaaagttatatcttttcggcgaaatccgacacaaagaatttgcattatttcttttctgccgtttccgggcgaccaatacctttggcagacacaaccatactacactccccgttaaacaccgccccgacttcaacaaccatggttgccgcagagatcgttcccttcacgtttgattttgcccttaacacgacaataccggttgaaacgatatccccctccacgttcccgaacacgtcaatattcggagaattaacttttcccgaaacacgagaagaaggcccgagcaccaaacgcccatcagtacgaactgtcccgacaagcgtgccgtcaatccgtatatcccttggcgtttgaatatctccctccacgacgacaccttcattcaaaagattcaagattgcctgtacttcctttcccatatttttatttcattttatttcccaaatgcgacacatacgttacttcgataattagcacgttttcttatcatgacatactaattccgggtttaaagttagtgaaatttcgtcaaatacatacaccatctcttccgacacacactcactcttcacctcacgccccacgctcgtcagatgaaatagacgaaaagaatacaccacacagcctacatttctcaaatttattccacatttgcacgcaatcaaaaacccatgcttcttatatattattaacattttcatcctcaaacacacgcctttttccactgaaaagaaatatcaaagcctgaactcacacccaccgtatatttttactatttttgcccgctcaatagaatgaaccagtttatttaaaagaatatacatgaactacaaggaaacattagaatggttgtttgcccaacttcccatgtatcaaagagaaggtaaggccgcgtacaaagccaatctggacaacacgttaaaactggatgaacacttcggttctccgcacaaacaattcaagaccatccacgtggggggtacaaacggtaagggttcggtgtctcacatgctagcctccatattacaggaagccgggtataaaaccggactatacacgtcaccgcacttgaaagatttccgcgaacgtatcaaaataaacggggagatgatcacggaacaatacgtgatcaatttcgtggaagagaataaatcccttttcgccgggatcaaaccgtccttcttcgagatgacagtggccatggcctttcaatatttcgcagaccagcaagttgatattgctgttatcgaagtcggacttggcggacgactggactccacgaatatcattacccctctggcctcggtgatcacgaatatttcattcgatcacatggcccttctcggtgacacgcttgaaaaaatcgcacacgaaaaagcggggattatcaaacccggtgttcccgcgatcatcggaacgaaagaccctgccagtgattttgtcttcattgaaaaagcaaaagagtgtgaaaccacccttgaatttgcatccgaaaactggcaagtaacacgggataatgaaaacgcctaccggctggaaaacaaaaacgggatcgtgtttgtccccgtgcaagcagacttgaaaggactttatcaacgaaaaaacattccggccgttctggaaacggttctaagcttaagaaacaatggtttacatatctccgatcaaaacatatataacggcatagccaacacgattcgcaacacgggattacttggacgttggcaagaattatcacaaacgccctatacggtatgcgacaccggacacaacatcgatggactgaccgagattgtcgcccaattaaaaacctgcacgtatgaaaaactccatttcgtgatcggtatggtaaacgacaaggacgtggacagcgtgttgcacatcctgccaaaagacgctatttattatttctgcaaagcatccatacccagagccatggatgagaaaactttagccgagaaagcccgggcaaatcatctccacggggaaaccttcccgacagttgcagctgcttatcaagccgctcgtgaagccgccagcaaccgggatatgatatacatcgggggaagcacttttgtcgtcgcggaagtggtttaaaaaaacttataaactaaagagtgtcaaaacaaattttgacactctttttactacacgaaaaatcaaactataaactttgtcttattcctttttaggagtttctttttgcgctttaaataccgcaatcacgttattactatctttcaacgtcaacttatcattctttatgataaaactcttcgtatcttccagaaccttgaaaaaacttgtttcaatatccatatcagggcaagccatcttggttgctcccataccgctaaaagttaattgcgactcgttttgttcgtaaactccaaaaaagcgattacatcccgcccttccaaatactttcttatcactgctttcaagcgtgatgaacacctcgctcccaccttccttgaacttaatctctttcccgttcaaactctccgcaacccatttcaccccggtcagagaaacgctctcctttgccgacttgcacgaagtcatccatattgctaatacacaataaaaaaatattcctttcataattcaatcaccattttggataattagtactcattagttttctcattcttttctacaaataccatgccaaaagggaatttcatcaataaacctcacctcattcaaacattcatttatttgaaaaatcaagcagtaaaaaaaaacatctaaagggatgaattaacttttgaattactgaataaattcaataattgattatatatttgcacgtgt

SEQ ID NO: 445 - DNA, 3695 bp, Butyricimonas faecihominis
aaaggcacacccataaataatattacagttttttgaagtaaacttgtaacagaaaatagaattgaaaatgctttatacaatttattgaatgtcaaatctagtaaaccaattttaggaaactacatagaagagacgaggaaagggatgcccacccttaattcaccccacaagaaaaaaaagagagaacagattccccaatttttctttcaaaattctccgggccacctgtttttgctttttcacggtctccacggcaattcccaactcatcagcaatctccttggcagaataaccttgtatcgcccgggaaaacacgttcctgcttccatgaggtaaatcctctaaagtccgcatgacaatacgaaaagtttcatttttaatatattcattcatctcggactcctccagctcctcagcaaaagaccttgtggcatcttgacgaattttctccgcacgcaaataattaaaacttctgaaacggaccatctggtacaaataagcggacaagttatcaatccctcccaacttttcccgagtttcccatattttcacgaatacatcctgcacaatatcttcagccgcttcttgattgtcgagatatttcattgcaaaagagaccaatacggaatagtaatctacaaaaagcccttgaaaagccctttcgtcaccatccatcagactatttacatttatagaggctccttctatcataaaacgaacgttttatgaaggggcaaaatgggcgagaatccttgtttcagatgtctatgatgaatttgtaaaatgttgatttatagtacggaatgggtgtgatgtgaatctgttgaacaaaagtcaataaacgttcatttattgtgcaaatataaagaatttattttacaataataaatcacaaattcccaaatcgtaatatatatacaatcaactaataacaaatatattaatcatcaatcatttctaattcttttcgtccattcttttccattccggtatatatcccccacaattttattttcacggttatgctattttgtcagctaaaactgctaaatttgcagatgagtattgaggattggattctttttcacgttccatgccagacatcaaggataaagaattcataaattgtaaatcacatggaggacatcagaacgattaaacaacgtttcgaaattatcgggaacgacatcaagctaaaccgggcaatagaaaaagctgtacaagtggcacccacggattttaccgtgcttatcacaggggagagtggcgtggggaaagagattttcccccggattatccacagtttcagcgcccgtaaacatgcacagtacatcgcggttaactgcgggggaattccggaaggaaccattgactccgaattattcggccacgagaaaggctcattcacgggagcgctatccgaccggaaaggttacttcgaggtcagtgacgggggaacaattttcctagatgaagtgggagaattacctttatccacgcaggcgaaattgttacgcgtacttgaggccggagagtttatccgggtcggatcgtcgaaagtacaaaaaacgaacgtgcgagtaattgccgccacgaacgtggacctaccagcggctgtcaagaacgggaagttcagagaagacctttactaccggatcaacacgatcccgatttcgattcctgcactacgggaccggaaagaagatatatccctcctgttccgaaaattcgcagctgacttcgctgaaaaataccgtatgcctcccatccgactgaccgaggacgccgtgcaaatactcgaaaactaccggtggccgggaaacgtgcgggaattgaaaaacatcacggaacaaatttccattctcgaacaggaaaggacggttgatgccttgagattaaaagagtatctcccggcacaaaataatacgctcccggcattaacatctaacccggaaagcgatcatagttttgccacggaacgggaaatcctgtacaaaatactttttgacatgaaaaaggacatgaacgatttgaaacacctcgtgtacgacatcatgcaaaaagaacacacgataaagcccgaaccggaaccttccacctccatcgttctccggaacttgtatgaaactccgcaatcggaattccttggacaagccccgcaaaagacgatctccgtggagaagaacaatcatatcgaggatacagaagctgtcgtggaagaatccctctcactggaagagaaagaaaaagaaatgatcgtgaaagccttggaaaaaaaccacggcaaacgaaaactggccgcgcaggatcttggaatatcagaaagaactctataccggaaattaaaagagtatgatattgaaatttgaaaacacgaagagacgaatttctgcaaattaaaattatctttgtctggtacaaatagcatcgcgtgcatatcaagataaaatacacatgatcaagaaaattatacctatattattgttggcttttgcctttaacgggtgtaaactacaaagtattagttactcgttttcaggcgtgtcgttacaaaatggagaaaaaacattttcggtagattacttctcgaataaaaccgcttttgccccgaacttgggggcggatttcacggaagcactgaaaagctatttacgttcgcgaacaaacctgaccgaattgacagacaatgacggggatattcgtttcgagggacagatcaccggattcacacaaaccccggttgacatcaccgccgatgaaatcgccgccaagaaccggttgacaatcacgatccgggtgaaatacacgaacacgaaagacgaatcggggaaatcggatttcgacacgtcattctcgcattatgaagattacgggattgacgagaattacgagtccatcgaacccgacttgatcaagaaaatcacagagaagattatcgaagatatttataacaaggccttaacaaactggtaaacgttgaaaccggaagaattaattgatattatacgttcaggacgaaaagagggagaggacatccggaacatggaatttctcatagaacaattcccttatttcgccacggcacgaaccgtgtacttgaaaatgttacacgattcgggtcactcggcctatcccgagaaattaaagcataatacgatttacattcctaatcacaaacagttttatcgtttcctgaacaatttattatcggattggaacgagatcgggaatccggtgttcaagccggaacctgttgcaatcgagttgctggaagacaaggaagaggagaagaaagtcgttcccgcaaccacgttctaccaacttgaaaacgagttcccggaggaggaattcctaccgatagatgccatcgcaaatgaatggttgtcacgtaaaaaacaaaaagaggaacgaaaagattcccttattgataaatttatccaagaagaaccctccatgcccaagatcacggaggaaaacccgggaacaccagtcatcacagagcctgtcacggatgaaaaaaccgaatttttctcggaaactctggcaaaaatatacgtccgccaacaactatatgacaaggccattgcaacttatctaaaattaagtttgaaatatccggaaaaaagtgtttactttgcggttcagattgaaaaaataaaagagaaaattaataataataagaactaattatgtac

SEQ ID NO: 446 - DNA, 3695 bp, Butyricimonas faecihominis
attttttaacattcccgttataccttgaaagataaaaatgggtatgaaatataaaagactgtttctaggaatatgcctaacgttactgatggtgataagtcaggcacaagaacgggtgttaccgaagttcaaactcgggggagcgctccgttttaattacaatttctgcgattggaaacccggacatcgtgaccggggtggagattttggtttcgacgtgttatacttcaaattgtcaggctcctaccgaaatatcattctaagcgcagactaccgcttttacagcaaagatttcggtggtcccatgctgaaatacgggtggatcggctaccagttcaacgacaaaagtcaaatgcaactgggactaacgggagtgcctttcggtattcaacctatcgcctcgcacaatttcttcctgcaaatcgcttattacatcggactagaagacgattcagacatgggaatcaagtatttatatcaaggtgacacgtgggattttactttcgcttttttcaagaatgcagatgaactacttttcgggtcagataacgagacttccgatgatcgatacggttacgacgtggccggacggaacaaagagatcaatcaaatcaacggacaagccttttataaattcggggaatctacccggcaacgattaggcggatcggcagagttcggacaactttacaacctcgacacccgcaagaacggtacacattacgctttcgccctacattatgaactaaccacgaaaagagtcagcctgaaagcacaattgacaacttatgccatgaaccctaaaaatggcgagggagatgacgatgagctgatctcgatgacggcttacggggccccctatctggtagccgccaaggcaaacgtgtatatgttgggagccgggtacacgatcccggtaaacaggaaatttctaaagaaaatacaagtgtacaacgacttcggttggctcgacaaacagaacaacgattacaaagatagtttccaaaacgtcacgggatgtatgctggacggtggccccgtgtgtatttacgtggattacgctctaggtaaaaatcacgggtggctgggacctaatttcaatggtttcggtaccggtggcgaaagtgattcttggcacgcccgttttaacgtgaacgtgggttattatttttaacttttaaacgcaatacaaatgataaaagagatttacactctatacgtggaacgttggcactttttcctagacctcacgtgggagcacctgcaaatatcactgatgtccatcgtgatcgccacgatggttggattgggactaggaatcatgattagtatgtaccggaaaagttcatccaccgtgttgggcctcacgaactttatttacaccatcccgtcaattgccctgttcggttttttgattcctttttccggaatcggtaacaccacggccatcatcgccttgagcatttacgccctgcttccgatggtccataatacctacacgggaattattggcatcgacaaggagattatcgaggcggcacggggaatgggcagcacgaccttccagatactctataaaatacagattccactggcatttcctgttatcctgtcgggaatacgtaacatggtcgtgatgaccatcgccctcacgggtatcgccgcatttatcggtgccgggggattaggagtagccatctaccggggaatcacaaccaataattcggccatgacgattgccgggagtttattaatagccctgctagccttgctggcagattggggtgtgggacgctacgaaaagcatattaaaagaaaacgtaaattactatgaaaaaaaacatgaaaaacggactacttgcactattcattggcctcgtactcctttcgggatgcgagtcgaaaaaggacacgatccatattgccaccaaaccgatgagcgaacaattcattctcggagagatgcttgccctgctcattgaagaaaactccgatttgcacgtgaaaatcacgaaaggcgtgggtggtggcacgagcaacattcatccggccatggtcaagggagatttcgacctttacccggaatacacgggtacaggctggttggtgatcttgaaaaaagacacgctactcccactcgaccaattattctccgagttacaaaaagaatattcccgggaatacgggctgaaatgggttgccccctacggctttaacaatgcttatagcttggctgtaagtaatgaaatggcaaaaaaatataacttaaaaacattttccgatctggccctttatcccgctttattcactttcggggcggaatatgacttttacgaaattaatgacgggtacgcggatctctgcgcctactataacctcaaattcaagaaaaacttggatatggacattggattgaagtacgaggccatgaaatccggcaagattgatgtaatcaacattttcacgacggatgggcagttaagccacgcgaatctcacggttctaaaagatgacaagcacttcttcccttcctactattgcgcaacaatcgtacgagaggaaacattgaaggaacacccggaactggaaaggatactggaaaagatgaacggtatactgactgatcaggaaatggccgacatgaattacaaagtcgacgtggaacatcgcacggaacgggaagttgccgtggagtttttaaagaaaaaaggtttacttaatccacaattgagttatggaaaataatgttgctattcgttttgaacacgtcaataaatcatacgggaaccgggaaatattaaaggacttcaacttggagatccggaaaggcgagttcctaaccattattggaagttccggttctgggaagacaaccgtactaaagttaattaacgggctgatctctcccactttcgggatcatttatgtcgatgggaaagatatttcgaaagaggaccaaacacttttacgtcgtaacatcgggtacgtcattcaaggtatcgggttgtttccccacatgaccattcgtaaaaacatcgcttacgtccccagcctactgaatcacagggacaaagaacgtacccgcaaagcggtggaacgattgattgatgtggtcggtcttgacagggatatgctcgaccgttacccggcagaactgtccggtggtcaacgccaacgagttggtatcgcccgagcccttgccgcaaacccggatatcctgctcatggacgaaccgttcggggcggttgatgagattacacgtaaaatgttacagagtgaaattattcgcattcacgagcagttaggagtgactatcgtgtttatcacccacgatataaaagaagctctaaaactgggtacccgagttatggtcatgaacaaagggcttgttgagcaactggacaccccggatcatatcaggaataccccggcaacacctttcgtgaaagaattaatagaaggctgacatttacaagtcagtctttttctttccatttcacatcactattctttttgatgtatatccgcaatgcgacataaacattccaaagtaaaataaccaaaccgacaaacagtattagttttaacaccacatacaaaattccaaccactcctcctagcatcatactttttattattattgattaaacacttatttctatcgagttaggaaagctaatgaatatttttaatat

SEQ ID NO: 447 - DNA, 3687 bp, Butyricimonas faecihominis
attatggattatatcgaaatagttttaaagtaaatgaattgatgggaacagggaaaactttaaaattttcaagcttgacagaaccaggagaatacacgattaaagcagaatgcgaggggaaagtgatcccgatgaatggcaccattcatgtgcgggatataaatgtgcatccaccttgtgtgacagaggaggttagtactggaagtgaacatataattcgtagaactacttattatgatgggcaagggcgttcggtgcagcaggttggtgttggggcatctcccggaggaaaagatattgtaaccccagtcgttcgggatggtgccgggcgtgaaacgacgacttatcttccttacgtgatggatggtaacggtgtctttcgtgtgaatgccgagactgaacaagaaaccttttattcgaatctttacggtgcgaatcccgtggcatatacaagttcaagattcgatgatagtccttatgatcgagtgatcgagcaaggagggttgggattttcttggcgtttgggtggcggacacacgacacttttttcttaccgtaaaaatgtggcaaatgatagcgtgaaatgttatgtattagtaggaacttccgtgcgacttgattctacattttggcctatcaacagtctttcggtgcaagtggtcactaatccggaaggtgatatggcagtagaatatcgggatatagagggaaatattgtagctagggagacgaggttgacaacaggaaaacgaatgttctcttacgaggttcgggatatgcttgggcgtcttcgctatgtgattccacctattcaggattctctttttacaagtggaacgaaatctctaacagaattattgtgttattgttattatacggaatatgatgaccgaggacgggcatataaacaatacaaaccgggggcaggttttgtaataaatctatatgacaatcggggacgcctcgtgttaactcaggatgcagaacaacggaagaggggcaagtggagttttacaaaatatgacgaattaaatcggcctgtcatatctggtttctgcacggggacggaaacggaacatcgtgcagcattggcatcccagacgattttcggtgaaacgaggggaactgctttacatggttacacgaacgggacttatcccacggcagtcacggctaatgactgttatcttatcacgtattatgataattacgattggagcgggcaatccgcagtggcttattcttcagtcgataccgttggagaggctaaaaatgataacgtgatagggcaaattactggaacaaagacgaaagtgcttggaattgtgtcgcatcagtggttattatcagccacgtattttgataagaagtatcgttccgttcagagtgtgtctcagctttatccttccggtttggaaattgtttcgaatgcctatgattttacaggccaagttactcgggcgaaagtgaaacaaactgtgggggctttggtaacggaatataacaagtatttcacgtatgatcaacaaggacggcttgtgaagatcgatcagcagataactggagataatgttaacggacgagtgacaattattgagaatgtgtacgatgaactggggcgtttgtctgccaagaaactgcataacgggagggaaatacaatcttaccagtataatgtggggggaaatgttacgagcgtgtcatcatccgcttttagttatacgttaggttatgatcaggtcggcgtgacaggggctaccgcacgttatgatggtaatatcaatgccatgacgtggaaaaatggaggtggtatggaaaaggcttatatttattcttatgatccgttagggcagctaagagaggctatttataaagaaaagagcgggacaaattggactgcaaattccacgggaaaatataatatgtatggtcttgcttatgatttgaatggaaatatcaagagtttatatcgaaatggagcaacgggaacaactcttcatgctctggattacacgtacggtacaacgggtaacggtaatgccgtcagtaaaatcacgttgaacgggggtgcacttggaacttatgcgtataacgagaatggtaatatgataacagacggacggcgaggtcactcaattacttataacgaattgaatttacctgctgaaatcagtcatggacaaaataaaatatcgtatatttacagtgcggatggcgagaagttagcccagcaagttgcggggagttcttcgacgtattatcggggagtgatgatatataacggggatatgcttgattgtatttttcacccttccggggtaactagaaaagtgaacaatggctatgtttacgattattttttagccgatcatcttggtagtactcgggttgtgttagaggcaagtgctagtgcgcttacacctatacagacaaccgaatattatccttttggtttggcgttcacgtataataatcttaacaaaaacaagcaattgtttagtggtaaagagttgcaggatgcggaattagccaaggagatagtgggttggtatgatttcggttcaagattctatgatcctgttgtagcaagatggttttgtcaagaccctgcatcacaattaacttctccctacgtgtattgcggcaataatccggtggcgtttgttgatccggatggagaatcgtttcttgcagctttttttattggggctatggctaatgtcgttttaaaaggatttatgggaaatgatagtggaaatttttggaaagactatcttataggaggaattgctggtgttgcaggattgggagcaggaatgggagtgggtaatttaatctcgtcgagttcttcgattggagggggatttgttggaggttctatttctggagcaactggaggctttgctggtggttttgtcggaggggttggaaattcatggctttacgggggaaactttgggcaaggtctaaaaaatggaatgatggatggtagtattggaatagttacaggaggattggccgggggaataggacgaggtttttccgattatcgtagagggtatagtttttggaatggggtcggagagactacagagttttctttgggacaaagtgctttgaaaggtaatgaagcattgattgcaaaagaatatgcccgaggtcgtcaagcgatatgggatacagattatttacaaaatagaataaaagacgagtttaatattggagaaggtgattggggaataaaagaaattacaacaaaatctggacgaggttacgggatggatcgttatggaaatatgtacaatttgaaaactagatcaaaagtaggtggatatgcacgtgggacttcaaacggctcatttatacatatatcaccgatgacaacaaattcaaatacagttgattttagagctattagtggacatgaacttaatcatgcctatcatttttatcgatttggagcattagcaaataagatttattctgaacgagttgcatatgaatatagctttaatgtttacttgaaaagtgggaatttaagctctgcctatagaataatgaatacggcattacgtaataatttctggggctattatcccaatcgctataagattcccgcatattttaccttttactgatataatatgaaaaagacaagtacaatattgattataagcttactagtac

SEQ ID NO: 448 - DNA, 3667 bp, Butyricimonas faecihominis
gaggaaaggtttacctgcagatggtttgttttgcgagtaagcctttcctctttttatgtttctataacattgaggtttatttaaacgcctctttgattttctcgatatagtccagcttttcccacgtgaagagttctacttctttttcgatggttggccagtaattcgaggagaatacttttttcacgattctaggagtacgtcccatgtggccgtaacttgccgtttcctgataaatcgggttacggagtttcaggcgttcctcgatggctttcgggcgtaggtcaaagattgaagtgattttttcggcaatggcggcatcactcaagttcaccttggccgttccgtaagtgttcacgaaaactccaacggggcgggcaattccgatggcgtatgaaatctgtatcaatatttcgtcagcaatcccggctgcgaccatgtttttagcgatatggcgtgcggcgtaagcggcagaacggtccactttagacggatcttttccggaaaaagcgcctcccccgtgggctcccttgcccccgtaggtgtcaacgataatttttcttccggttaatcccgtgtccccgtgaggaccaccgatcacgaattttccggtagggttcacgtgaagaatcaaatcttcatcgaaaagggcctgtacccgttccggcaattggcgtttcactctcggtaacaaaatattaatgatgtcccagcgtatttgatccaccatttgagcgtcagcttccaattgtgcttccggagtggaggccgtggctttgacaaactcgtcatgttgggtggagatcacgatggtatgaatccgggcaggtttattgtcgtccccatattcgatggttacctgtgatttggagtccggacgcaaataagtcatttcctgaccttctttgcggatttgtgccagttcgtacaataataaatgtgatagctcgagagataacggcatgtaattgtccgtttcgttacaagcgtaaccgaacatcataccttgatctccggctccttgttccatggggtcttcccgaacaacgccgcggttgatgtcgggggattgttcgtgaatggcactcaggacgccacagctattcccgtcgaacatgtattcgcttttcgtgtaaccgatacggttgatcacttcccgtgcgatacgttgtacgtctacatacgcttcagttttgatttccccagcaacaatggtttgcccggtagttaccaatgtctcgcaagccactttggcatccgggtcaaaggcgatgattttgtcaagtacagcatcggaaatctggtcagccactttgtcggggtgaccttccgatacagattcagatgtaaataaatatcccataattcattttagatttagtgattcagtgatttggtgatttaatgatttgatgatttaatgatgttgtaacaaacgaatcacttaatcgaaaatcatttaatctctcaatctctttatcgtaaattaaactataggaaagtacatggatggttgaattcagaattaaatatgcattttagcgctttttttccgtggttgcaatcagccaaatctttccactttttcgaggggcaaagatagatttttattagataggaatgaaactttctttcgtaaaatgagtatttttgttattaaagaatgtaattatgggacacgaccattcacataccgggcatcaacacgctcatgaagagagtacaaagaatttgggtatcgcttttttcctgaatctgggatttgccgttatcgagattgtcgggggaatatggaccaattcggtggctattatttccgatgcggtacatgatttcggggatgctttttctatcggggtttcttattttctggaacgttattcgagaaagaagaggaccgtgacatttacttacgggtataaacgattttcgacgctgggggcgttaatcaattcgatcgtgttgctggtagggtcgatcttcgtgttcatggagacgattccccgtttatttcatcccgcagaggtgaattactccgggatgatgtggttggcggtggcgggacttgtcgtgaacgggttcgctgccttgcggttgatgaaaggaaattcgatcagccagcgggccgtgatgttgcatttgctggaggacgtgctgggatgggtggccgtgttgatcggtagcgtgattattcgttacacgggatggtattttatagatccgctactttcggtttgtatcggggtgtttattctgacgaacgtgtgtcggaatttgtacacaattttcagaatccttttgcaagctacaccagagcatatgccggaggataagataaaggccattttactggaggtgccgaacgtgaagaacgtgcatgacctgcacgtgtggacgctggacggggaaaggaatatcgcttcggctcacctgattgtggcagatgatatttcccggacggatgccatccgggtgaaacatgatgccgtggatcggttgaaggaggcgggcatagatcacctgaccgtggaaatcgagttcgaaggggagggatgttatagttgtcccgtggaatgacgggaggcatcaatccgttccgtgaactcggagatttcgggaaggaagttctcgtcgagacgggcgaattccttggcaaagtttaggcctttttcaagtgcttgtaatttctgagaatgacgatttgttttttcgtagacggtagccaagttccagcaagcggccagaatggatggcggcgtttcgtactcgtcgtcgtacgtgtcctcgtaagcggaaacagagcgactgaacatctgttccgcggattcccagttgccccggtcataatggtgttgacctaatcgaaacaagtagctggctaggggtgttacgaggtaatcgttatggcgaaccagtttaacggattgttcgtaactttccagtccttccagtaaaatagaatcgagtgtttcgggagttgtcatgatctcttgcaggtagggatcgtcaatagaaagccatttgtaatctaggctttcgttcaagtctatgtgtatacgtttattcccggtatacgcgaacacgaaacgaaaatcgtgatgatagtgctgatcttcgtttttcttctcgttacgtggaatcgggtgggaattgatctcgacacaatagggcttatttttaatgaggttgatgggaatcagttgttcggctgtcagtccggtttcttcttccacttcccgtaatgaagcttcgaagagagaatcatcgtcgaggtctacgtggccaccgggaatatgccatttatcaagggtcttgtgatgtagtaacaggacttcacgggtgggaatgtggatgatcgttccgcttgccgtgatgtgtccggtgaaatttttacggtcacacaaatcttcttcgtcgaagttgttgaatagttcgatgaactttttacttgccccgtttttcaggtatttcaagtgtttttgtatttctaatttcgttaccatagtcgctaaatcccctttttatggttgatttgtaaaaatacactttttttattttcaagtactcgtttggggaatgtaattttataaaatagagtttgtaatgaaaatatttttcatttttagtatgacttacgtaaatattttagaaagtattcgtatatttg

SEQ ID NO: 449 - DNA, 3652 bp, Butyricimonas faecihominis
atcttgaattataatatccttaatgaacgagataataccggtcgaaagataaagaatcagacaattgatttcatggtggatgtaaattataaaatattgtcaggattgacattctccggagtgttttctctatcaaaagctaatacgaaggattctgaatgggcaaacgagaaatcatattatattgcggatttacggggtgtgaattatggtgatgaattgccgaccgatcgtaattttgttgaaactaggtgccgtttaccttatggtggggaattgaaaaatgataatacattatcatctacatacacggtaagggctggatttaattatttcaaaaggttacatgaggtgcatgaaattgatgtgaatgtggggacggaagctcgttctgtaaaatatgacggaatatctactgtacaacggggatatttaccggatagaggtaagaagtttgttgctattaatgcaacagaatggcctttatataacgaatggttgatggctaatccggatgtggtggtggatcgtttgactaatgtggtttctttctatgggactttcacgtatacttatgatgaccgttacacggctaattttaatatccgtaccgatggatccaataaattcggacaggataagagtacgaaattcttgccagtatggtctgccgctgtccgttggaatattcataacgaggtgttctttcgtaatgtccaatggatgaatttattggcattgaaaggatcatacggggtacaaggtaatgtacattcggaccagactccggatctgatcgtgtccatgagtggaatggatgatgtttctaaagaatatatgtcatctttaaataaacttcagaatccatatttgaagtgggaaaagacaaaatcttataatttagctttagagtttgcatttttgaataataggatcagtggttatgctgaatattatttgaaaaaaggtgaagatcagattataaccaaacgagtttcaacggtttccggtaaaagagatgtttcaattaacgggggtgatgtggaaaataagggttgggaatttacgttaaatggaactccgataaaaacgaaggattttatatggggactctctttgaatatgtatcagaattataataaagtaaccagtaagaatcagacgcagacttatgattacaaggattatttgcaagggaatctgattgtggagtctaagcctttggatggcttttattcctataagtttgatggtttggatgaagaggggttaccgaaatttaaagatatagatgagccggacggtatctcaaaagaggaaatgtttgctaaagcatttgcgtattccggaaaacgggtggctgattttaacggaggattttcgacttatttcagttttaaaggttttacattgaacgcattatttgctttctctgtaggtaaaaaagttcgattgaataatttgtatgaatctacaggacagatgttgcctttgcctcagcaaaatatgtctgatgaatttgtaaatcgttggagaaaagggataaacgagaatacggatattccagcgttgtcagatttgagtttagcttattctgatatggatcgtaaatatacaatatccagtaataagtgggagatgtataataatgcagatttacgggttgtgtcgggtgattttttgcggatgagaaatatttcgttgagttataatttgccggaacatctttataaacacatcggagtgtctggagttagtttgcgtttagaggctgggaatctttggttgtgggctaataagaaattacgaggacaggatccggaacagatgactttgggatccggaacggtacctccgacgaagagttttacttttggattaaatatttcactttaaaacgagactgttatgaagaaattgatatatataatagttgtagtacttttctcttcgtgtggagattttctggaagagagttctcaagacctaattattcctaaaacggtaaaggactatagtgaatttttgtttggggaggggtatatccgaaataatacgtcgattcatacgtatttggatattatgacggatgatgttgaagaaaaagcgaatacatggcccgttatgcagtcagatattcggggggatgggtatggttatttttgttggcaaccgaatccggagtatcgttttaccggggcgttgaatacggataatgcttgggaaacgtattatagtaagatacttattgctaataatgtcattgatttattggatgatgcggaaggaattcagagcgataaagatgatttactgggggaagcttattttttgcgtgcgtattgttattttatgctagtaaatttgtacggtgaaccttacgagaaagaaacggctgataaagctttaggtattccctttaattacgagcatagtgtgcgggagcggacatataaacgggaaacattggcacgttcttatgaattgatagagaaagatctgataaagtctattcaacttcttgaagctacggattatacgaaaacggtttttcggatatccaaaggtgctgcttatttgttagcctctagattttatctatacaaaaaagactatgaacaagccatttcttatgcggataaggttttaacggtaaattcggctttatatgatattcgaacgttaacggaagaagattatgtttttacgaaagaaaatcctgaaattatttggacgtatggtgattatgaagtgaattatcttagtgctgcatatcgtgggtgttttcctgtttcaatggcgttttataattcatttcatgcaaatgatgcccgaaaacggacttacgtgaaagatgattggggtgatttgattgttgggaagggtgctgcaaatacaggagtatatggtttcgcttttcgtacggcagaggcctatctgaatcgagcagaggctaatgcggagttggggcatacggatttggctttggatgatattgaacatctgcggaaatatcgttatgaggtagaggttccaataacagtttctacgaaaacagatgttattcagttggttcggcaggaacgccgtttcgagttgtgtttcgagcaacatcgttggtttgacctccggcgttgggatcgtccaaggatagagcatatttacacgacagacatgaatagttctcaaaaagtgaaatttgtacttgaagagaatgataaagcgtacacgttgcctctgcctgtggaggtaaaagagtttgactataatctggagaatatcaatcgtccggagagaaaaggggttattgtacaataattaaaagaagaataggatgagaacaaataaattactatcgttaatcattgtattaggtatgggattttcagcctgttatgatgagaatgacattcatacgacgaagggagatatcccttatgaattgaaggagggaggggatgcggtcgatcaatatatttataaattttatcgagagaacggatcaattattatggttgattacgatacgattgattaccagtggaacatgagtggactagcaaaaaatgtttatctgacaaaacaagaagaccgagtagttttgatgaagggattttctatgttagaaaagacatttttaagtatctatgat

SEQ ID NO: 450 - DNA, 3650 bp, Butyricimonas faecihominis
ttaaaaatcagtattatgaatttctttttatgtaattcaaaaaaaagttcgtttttttgctcacgggtgtgtaaatattatgtataaaattgtttattcctaacagattacctttcaatagcctaaattgaaaggtttttattttttttattgaaagaataattttacttttgtcgtaataaaacgaacgttttattgaatcttctggttgatggtgtttatttcttgaaatttttgtttacttgcttgtaccttccgttttttgtatcgacaaatcactagaattcaaaataattacaatggtagtagcttatttgagggtaagtacagataaacaacatctcgataatcaaaaacaagaaattagaaggtatgccgcgaaaagaggcatcacgatcgatcgatgggtagaagaaactatttctgggactaaagatcaaaaacttagaaagcttggagggcttttaaagcgtcttaaaaaggatgacacgctaattgtctctgaaatatctcgattaagccgtcggctactcgaaatcatgggaatcttgaatacctgtattcgtaaaggagttattattcatagtgtaaaagagggatatgaactctccgataatataaatagtaaaatcatcacgatggcattcggtattgtttccgaggtcgagagaaatcttatctcgtctcgaacgaaagaagcactggcaaacaagaaggctcaagggataattcttggccgaccgcaaggatcttccccgaaaatggatatacttgaaaaaaattctgaggttatcacgaaattgcttgataataaaatcccttatgtgcaaatcgcgcggttgtttgacgtctctatcgggacattatgtagctacgtgaagaaactaaaaaactccccataagtggaagtttggcaagaatacatgagaaaattgtaaattaaaattttatgtgtcttatcgatagttaatagtaaacgtgaaagaaggagatgattagaggcattgtaggttgattaggttacataaaatttttatcattgcataattgttagactaacaaaacaatatcataatgtactaagcgtgtgtgaacactgtatttatttttcaataaagcaacgaattgaatatttaacaattggagtttgaggatcattacaatggattgttattgttttattttgtttacctagtttccctcgtgcctgaaatcctatttcaagtgtagttgattggtttggagggataattctattagcaagagtagggacagtacagccacaagacgtttcaattttgcgaatgattaagggcgttttccctttatttgtgatggagatatttgtcgtctttctttctcctccatacatatttccaaaatcatgttctctagaattgatttcaattattggtgcaatttccatttcttttgggcttaatggcttgaatctctcttgtatattagcttttagaacaaaatgttgatattgttcatgaccatctattgcaaaacggacttcatcaatataaagccctaatttattagtatcaattgtatgaaatgtaaaaaaaatggtgtcgcaatattttgcagggatattaattcctttatttacccaattattaggatggcaagttttactggatatgctacaatcagttagctcggtaataccttttagattgacaacactatctgtaggattatatactttaattgcttgacaatttctttctcctaaatacacagattcccaaaaaatattatatttttcaaataataaatttcttatttttattttacaatcatatttgggagaattgctacatgaatatagaataattgtcaataagaagatcaatatgcctttcatataactaactattgttataaatacttttctactgtattttttggataacatctaggtaatcaccttttccctcgaagataaagtatattttcagttttctttctgtgccattagaatattccgtagtctgaatatttactgcgtcatctaataatgttagcctaaaccattctccttgaagaatattcaaattatagtcgaattcgtgatggatcgtgtctctctcgacgaattcagctacctttaatatagaggtaagccctttacagttaaacttgataagggtgtcatgtgcatgttgatttagaacaacttcatgagattctaaatatccctcccatacgtgttgatcattgtctttggaacaacctaaaactatatttactaaacaagaactagatataagtagtaatttgatattcattttgataaagttaaaaatttaagcgttataacagctaaaagggagtttaatctttgaacaattcaaatttaaataattcaaagtttacagagaaatgaggacgacaaataatattgtcgtccttttttttattcccaaacgcaccaaggacaaattggcataaaagttaatgacattttgtgataatactggctaggattgtacacaggtttgccattaccgtctattggctcagatggagatgcgtaccagccattgcctgttcctccatttgcaaaaacacaatgaacacttgtcaacattatatcagttacgttagaattgaccataccccaaaatccatcaactatccatgcttcggcttgggagaaagagcgatctaaagcagcattcacagtgggacaagaaaagcgtaaggatttgaatgttgtaataatatcatgtttgttttggtaacggtagtatttagaggtgaaacctaatgatgttaatacatctcctaaatctgcaatttcagttgaagatcctgtacatttaaatttagttgttttatctggatcgaattctttgacaaaagctgcaactttaggagcaagttctgtatcccattcgtaaattttggattgagcaattagttgagtgatattatgttttttcaataaagctgccggaacgtcataatcttgtggatagtttgcgatagattgagcaattgaaatagcagttgaacttgcttggtattttccatttaaagtttctgtacatgcagaggtcggtgatttataattgttattatatggttcaactcggtgccattgagtcttaataaatgggggtaacgtccattcttggtaaaattcattggcggatgttcctttggtgtaaaaaatgttaaggtcttctgccaaaacatctttaaatcctttaaccatataagccattcctggtacatatgcggtatctgccaatgctccttcttctacgaatgctaaaactctatcaactctttgatcatctgttgcaatagcgaaaccttgtttactatctttttcaaatgtaaatctataggtatcaacatttatatcaatttgtttcgaactccttgttaaattttggcataaattgtctaccttaattatatctttatcgatttttttgatttttaaatcagagaaatcaaatatatttgaacgagacgatttgctatttacttgttctacaaatttttttattaatctccatgctttgtcttgtccattcacattttcttgaatttcttcttgtttttgattgtctatcaaattttctttctcattgctacatttatagaatgcaaataatgagataatg

SEQ ID NO: 451 - DNA, 3637 bp, Butyricimonas faecihominis
aactatacgtgattaataaagtaaaagagttgagaaaagctgcaaatctgagccaagaaaaattatcattagagctaaaattagacagctcttttgttggacatgcagagagattacagcgagaggaaaaatataatttaaatcacattaatgaaatcgccaaatattttgatgtgcctattgccagcctttttcctcctcaatatctaaaaacagattgcattgaagagtactgggaaaagcatccaaaacaaagaaaaaaatatgatccaaaaccggaatagtaggcagaacaaaagaataagtttgatacaaaaatgaaataaagaaataatactatcttctccaatgcgattctttagttgcattttctaattgaatctacgatttccggaattgacaaaacatggttgatcaattaattttttttgaaatgacaccaaaacaggaaaataaaggaaagatcaagaacacggaaatagaactttatgttatcaataaagttaaagaatataggatagctgcgaaaatgagccaaagaaaactttgcatggaattgagattaagtcctacttacgtattttatgccgagagtcccaaatatactgcaaaatacaatttaaatcaacttaatgaacttgctaagattttcaaatgctcgattgcagattttatgccttctccttacgtggaagtggatactattgaagaatacatggatttgcatcccaaagtaagaataagaaatgaaaagatgataaaggatgcagaggaaaaaggacggaaaaagagggtggaaaaggaaaagaaaggcaaagcggaaaggaaaaagcagtaatctatttgaactgttcgtgtcattaccctaatccaaccccaataaagcggtaatttaacccaaataatctcgctccctcagagatcattccatgcttactcagaacttaatcattccgttatgtttgaactacgaagaagtttcgaatgagtttcgaacaagagggattatttccctaggttctccgtgggatttcccctagttctggctttatacccttgctgctactttctttcgccctactattacttacatcctattattatgtctcccttatcttttcgttatctcttcgtttctatagctatgctttaacaatcggataacgaatacataacggagagatacaagagaaagtattatgtattagagtatttgttgagatgcgtctattcttgatctgtaattttgtgatgagaggttggggtgactgaaatagagagatgattaggagcaaacttttttaggataagatattagaaacatattcatatcttatctagattatatctatttgggagagaagatttctgatatttttcgtatgtttatatattataaattgatgccttatgacaaaagaaaatgcgatcaaattgtttgaagataaaaagattcgaaccgtttaggataatgaatctgaaaaatggtatatatcaatcattgatgttattcaagttttaacagggaatgaacgccctcggaaatattggggtgaccttaagcgtaagctaaaaaaggaggggagtcagttgtccgattttttcggacaactgaaaatgcaatcttctgatggaaaattttacaagacagatgtggccgatgtcgagcaactttttcgtttaatacaatccataccttctcccaaagccgagccctttaaattgtggttggcagaaattgcacggaaacggctggaagaggtggatgatccggaaaaagggattgaacggttgatggaatattatcatcgtaaaggttattctgtcacttggataaatcaacgtttgaaaagcattgaggtcgcaaaggactcgaactcgtggcacattgattaagagtcaatggatccactttttgtctgtgttatcttttttactccaattctcgtttatattgctcaattttctcttttaacggttgcaattcggtttgtatggttgcccataccatttcgtcgctaatttgataataaccgtgtactaggacatgacgcattccaataataattttccattcaatttcgggatgcttttctttaaattcattcgtgagtagataggcggcttcgccaataatttccaagtttttgattatagcaaatcggagaattttattgtttttatattcttcaaaactgatatctttcgtgaactcgaacagattgtcgatagcctcgattatatgagataaacgattaatatctttaggcttttctctcatagattaatattttatcttgttctgccgaatctttcgcaaaatcttttagttgtccctcttccacgagatcaattttcttgcggagaagggattgtagagcgttcacgatgctaatgtatttaaaaagagtaacattcgcactcttgtcaaaacggacaagtatatcaatatcactttcttttgattcttccccacgagagtaagagccaaaaatccataccttttccacgggttgtagtgtgaaaaattctcttagtttattgataatagtctgtttcatactattgttctctttctgcaaatataggcattgttgaggacaaaacaaaaagaaaaccacctatgaaaataggtggtttcttcggtgacctcggtgggactcgaacccacggcccattgattaagagtcaattgctctaccagctgagctacgaagtcttccttgttgcaagggcttttaaccgttttgcgggtgcaaatatgcaacaatattttttaatctgcaagaaaattattctttaatgttgtgataaacgttagttacgtcatcatcttcttctaatttttccagcaatttgtccacggtttctctttgttcgtcggttaattcttttgtatcaagagggatacgctcgaattctccgctgaccatttcatagtggttatcttccaaatatttttgaatagctccgaatgcttcgaaagaaccgtagatgatcacgtgattttcttcgtcctcgaagatttcgtcggcaccgtagtcaatcatttccaattcgaattcttctaggtcgaagttctccgggcgggtaattttgaacacgcatttccggtcgaacaagaaatcgaggctaccggttgttcctaaagaaccgccgtatttattgaaacaatggcgtacgttggcaacggtacgggtgttattgtcggttgcggtttctaccacgatggcgattccgaaaggaccgtatccctcgtaaacgatctccttgtaatcagaagtatcttttgaaacggcgcgtttgatagctctttcgacgttctccttcggcatattttcagccttggcgttttggataagtatacgtaaacgcgtgttattcgctgggtccggaccaccggcttttacggcaatatcaatttcttttcctattctggtaaacgtacgggccatattgccccatctctttagcttccgtgctttacggtattcgaacgctcttcccatataattgaatcttatttatattacaatttgaaacgcgaatttagtttttctacttaaaacaaaaaaggaattcagcgattttgtgttgagaatgagtttcattccacgagttctacactgaaatcatc

SEQ ID NO: 452 - DNA, 3616 bp, Butyricimonas faecihominis
tacaaaaagtacgccatcgccctagggctcgatatataaaaaatactaacacgggctttctgcatttattttcgtcaagaatgacattctctattgtttttttagaaaatcttcactaatttgtaaccctcgaattattcgaagagttatatacgtttacaatattaatctaaaccgtattataatgaaaacctataaacctaacgaaattaaaaacatcgcgctcgtgggtagtgccgggtccggcaaaaccacgttagcggaagctatgatgtatgagggcggggtcatcccgcgcaggggtagcattagtgcaaaaaacacttcatccgactaccgtccggtagaacaggaatacggatcatcagtattcccggctgtattgtatacagaatggaaggagcataagctcaatttcattgacacgccgggagcagacgatttcgtcggaggagttatctctgcgctgaacgttgttgataccggagtaatggttattaacgccgtcagaggtattgaagtcggtaccgaaatcatcagccgccatgccaaaagactaaacaaaccgctcattttcgttataaatcaggttgatcacgagaaagcaaactttgatcacgcggtggaacaggccaaggcagctttcggctcgaaagtcgtgctagttcaatacccggtgaacccgggaatcggctttaaccgcgtcatagacgtcttgaaaatggagatgtatcaatggaaaccggaaggtggtaaacccgacgtactccccattcccaaggaagaagaagaaaaagctaacgaattacataacgcactgatcgaggcggccgccgaaaacgacgagggattgatggaattgttctttgacaaaggtagtctcacggaagatgaaatgcgtgccggaatccgcaaaggacttatcgcacgggatatgttccccgttttctgcgtgtcggcagaaaaagatatgtgcgtgcgccgtttcatggagttcgtgatcaacgtggctcccagtgccagctccatgccaccttccatcacggaagacggggatgaagttccgtatgacgagaaaggcccgacttccttatacatattcaacacgacagttgaacctcacttgggtgaagtgatctacttcaaagtggcatccgggactgtccacgagggggacgacttgtacaatgccaccaatgacgcaaaagagcgtatctcgacactatatgccgtggccgggaagaaccggacaaaagtgaccgaaatgatggccggagacatcggggctaccgtgaaattgaaaaacacgaataacggcgataccttgaacgagaaagacattcattacaagttcggcaagattcaatacccgaatcctcgtttcagaacagctgtcaaggccgtgaacactagcgacgaggaaaaactggcggaagtcctgcaacggattcaccaagaagacccgaccttccttgtggaatattccaaggagttgaaacaaatgatcatttccggccaaggagaattccacttgaacactatgaaatggcgtatagagcataacgataaactggaaatcgaattttacccgccacgtatcccgtaccgtgaaaccatcacgaaatacgcttacgcggactatcgccacaagaaacaatcgggtggtgccggacaattcggtgaggttcatctcgtgatcgaaccctacacggaaggaatgcccgccccaaccatgtacaagatcaatggtgtggatagtaagatttccgtgaaagacaccgaagtcgttgaacttccgtggggagggaaactggtattctacaactgtatcgtgggaggtgtgatcgacgcccgtttcatgcccgctatcctgaaagggatcatggaaaagatggaagaaggaccgcttaccgggtcatacgcacgggatatacgtgtcagcgtatacgacggaaaaatgcaccccgtggattcaaacgaaatttcgttcaaacttgccggacgtcacgctttcagtacggcgttcaaacaagcatccccgaagattttggagccgatctatgacgtggaagttctcgttccggatgaatacatgggtgacgtcatgggtgacctgcaaacccgtagagcaatcatcatgggtatggaagcagattccggattccagaaattgatggctaaagtaccgttgaaagagatgcaacgctactccacggcattgagttccatcacgggaggacgagcctctttcaccatgaatttctccggatatgaaaaagtaccggccgaagttcaagacgagttgttgaaagcttaccaagaggagaaggaagaggatgaataaataaaatgagggttcacttcattttgggacaacctcattgttcgtcataaaaaagcaccatttttacctgaatcagaggtaaaaaatggtgcttttattcatgacctcactttttaatcttttaccacgacgtcttctacgttacctttttcccaatctttttctgtcccttccggctgaaccacactctccggttttccaacctccacatcttccgtgtttccaatttgccagtctcccggcaacacattcacattcacgtcgtttttcttaatatcaattttatcatccggtaaaacttccgtgtttccggtttcatccgtcgtctccactttattcacggcagattccaattgtccatcgcccgcatcactctcgttcacctccatattcgtaaccacctgcatatccggtttcgttttcacgtccagagtcaaggcttgagtcaaaacaatctcccgagtatcatcccttgcaataatattacactcaatattattgctcgctccagtactcgtaccttcgtcaagcacaacaatattcatcgtggcagaataatggttttcttcttccgcacgcgagaatcctcgtatatttccacctttagtcatcgccacgaatacagttcctggattcttccattcagtctccccgaaggcaagtgtcgtccccacgttaggcacgagtattcccacttccgcaatctttcccgaataatcagtcacttgcatctttgtcgtcgccaacgttcgcttcgctgtcagttccacgctagtatcatcatctcctacagctagcgaacttttcgcaaaaagcacatcccctaatggcgtgaaatttgctgcaccttccttcttcgtcaactggattttcatatcagaaagagcggttccaaccacatcacccgcaatattggcatcctccaacacgttaccaacaaacacaatcgtgtagtttcctttgttcaattccaatttttcaattccatccacagagttatatttaaaactctcctgaagttttcctgcctgatcaaacacgtataatcgcacgtgagaaatgatccctttcaacccggtatcgtccaaactgctaacaccacttttcaatacgcattcgactttaacaactttctctcccggaataggttccggttcatcctctccgccaccagaacctccacaaccccaaaatcctacaatcaaggagaatgtcatcaatgtatagataattcttttcatttattccatttttaatggttattatttgtac

SEQ ID NO: 453 - DNA, 3609 bp, Butyricimonas faecihominis
tatttgtaccagctagcatacatggaataggaattcacgattctttccacttcgtcacgtaagagttccggacccatttgtttcaattttttagcgggagccccggcatatacccaaccggattcaacaacggtacctttcgtcaccacactaccggcagccacgatggaattactttcaatgacagcgttgtcaagaacgatagcacccataccgatcagtacgttatcatgaatcgtgcatccgtgaaccacggcattgtgggcgatagaaacgttattcccgatattggtcggagatttttgatacgttgcgtgtatcgtcgcgttatcttgaatgtttactttgttgcctattttaatataatgtacatcacctctcagaacggccccgtaccatatactacaatcgtcacccatctccacgtcgccaataacagcggcattttcagctaaaaaacaattcttgccgaatttcggcgtgtgtccatttaattctctgattattgccataatataattgaaaattgagagttgaaaaatggaaaataaaattcaattttcaacttcccggtttgtaaactaatttaacgtgtcgaaattacgaaatatatggcagaaaacaagaggggatggtctttttaaagatttcattcttgaggctggaaaaatttctctgattttttttgcttttagaaaaaaggtgttacttttgcatcgcagttgggaataacccacggcagagttcttaaatggaatagtaaatgcgaaaatagctcagttggtagagcataaccttgccaaggttagggtcgcgggttcgagtcccgtttttcgctcacttttaaatgcgaaagtagctcagttggtagagcacgaccttcccaaggtcggggtcgcgggttcgagccccgtttttcgctccttgtgacgagatcaattattggtctcgtttttttgtgtaatgtgttactcccaaattcttttcagttataaatcaatgtatatcccttattccagccttttgccggggatataatggctcgtaattttattcttgagtgtgaatagcctcgttattggcccggttgacaggttattcgagtatgttatttttgctttccatctgttaaaatggcggcgataatcgggcgagcatcgggcgacaatcgggcgatggcgcctaacagtcacctaataatcgccccaccgccatgtaacggacatggataaccccgggaaaagggatactaaacccgggattaattttagagtttagaatttagagttcaacttttagtttttatcttctcaaccaccctttcacgaggggagaaaatgcttggtgatgtgaataagagactattccgtgaaatcaacaaatgtccgactttcccgaatctttttgcagtaatcacttacttttacgtgttctggatgaactttataacgggcgagcgcttcggcatcggcaaaagtggagattaggaccgcatcgtatgccatatcggattccttttcattgattccgacctgtaatgatatgatttccggaacgataccgaccagtctttccaagctttctttcataattaacgcgttctctgcttttgtttttccctcggcaaactccttgagtttccacatgacaatatgttttagcatactttttgattttaaataatacgttgcaaaagtagtcttttataaaaaataaaactaattttggatgcaagggaggatcagatggggggattgaaaaataaatgtaaaacaaacgagttatggtggagaaggccaaaaaatcaaaagcgtcaaaagatcagactgctacagatataaatttcaaattcaagagtattcgcacaagttgtagcgaggtaattgattttaccggaaacaagcattatcgtacggttttccgcttgaacgaggtcgaaactttgttcgtggacacggaagtgataaataaacagtttgatgaaaaagcttgggatgcggagattgtggcggctttgatatatatgcatggagagcaacctgtactggtggcacaaaaaggaggaaaagttaccatccccgaaacggagtctgtttttcaattttcaactgctttttctgtcgaggactttacagactttaggtttcaagaaggagcttatcgggtacaagtgatgataaacgggcaagccggggtgtcggatgaaatccatttgttggaaccgcatgatttgttccgggattattttcaattgttggatattgggtttgacaaatgcgtggaggaagctcctgatgtgcagcgtcctcactcgtatcaggcctttgcagccaaaggattggaagacgttcggttctatctggtggcggagaattttttatcgagtgaatggacgtatgaatttttgattaacgtgtttgacgctaacggaatactaaaagctaatcgagtagctaaaggaaattattacattccgaatcgggaaggaaagcgtttgctttgttttgccttggatttaggggcaggattgagtaatttttgggaagaagggaaatatagggttgaagtattgtgttttgatcagcctgtgattcaattggagttttcgatcggggaacaggatttaccttacaattttaccgacgaaattgccggaatcaacgggcaggtacatgaagtggcgggagaaccttcaactccacaagataaggaagaggctctatcccgattgtatcagttagtgggattgcgtaaagtgaaagaggaaattacccggatgtacgagttggcagaattcgtgaaaatgcgacaagagaacggttttaacgataaacttccggttttgaatatgatccttatggggaatccgggaacaggtaaacatttggttaccgagatcacgggagagatgttttaccgtttgggagtactgtcaaacggtaaagtgcatcggtataagagagaggattttacccgtccgggaatggctgcggaagaacagttgattcgggaggctatcacgaagagcatcggaggtattctgttgattgaggatgcagatgaattgtacccgaccaatgatccgaatgatccttctatgcgtatttttaccgtgttgttgggaattttggaacaagagcaaccttctttgttggttgtcatggcgggcgatgttatggcattgcaggctattacagaaggaattcccggcgtgaaaaaatgtttcccttaccaatttgtatttgatgattattcggcagaggaattgatggaaattactcatcaaatgttggagaagcgacaatttaagtttacctcggaagcagaggataagttttccgatatgttgaaggattgttgttccgtgagggaatccggcttttccaatggtcggtttatagaagagcgactggatgatgccttgacacggatggccaagcgattgatggtaaatcacaagggtacacatacaaaggaagatatgatgttgatcaaggtggaagacatcgaaacactggaacagccggatccgagtaagtctgttgatgtgttgaatgatatgatcggatctaaagagttaaaaaacagtttgattagctatattaatta

SEQ ID NO: 454 - DNA, 3604 bp, Butyricimonas faecihominis
gatcacaatattcccctttacttttccggaaagtaataatagaaatagtaatatgaggtgtacatcgtgttcattttcttttcattgttcgggacaaatataggtattctgaaatataaaacaaataagtaagcggaaaagttaggagaaaaagtctaactttgtgtggattaatttgaaaaggaaagatgatgactaacgaggagaaaaaattgtacttgctggatgcttatgcgttgatttaccgttcatattacgcgtttatcaataatccccggatcacgacgacgggaataaatacatcggccactttcggtttttttaattttttactggaattgcttgaattggaaaaaccgactcatctggcagtagtttttgacccggaaggtcctactttccgtcatgaaatgtacccgccctacaaggcccagcgtcccccgatgccggaggacctgagaaagtcggttccttatattaaaagtattattgaaggattaggcattaaatcaattgttgtcagcgggtttgaggcggacgacgtaatcggaacgctggctaagcggggagagaaagaagggtttcaggtatatatgatcacgccggataaagattacgcccagttggtcagcgaacgagtgttcatgtataaaccggggcgtgccggaaataagtctgaagtgtggggtattccggaagtattggatcatttcgggatcgagcgggtggaacaggtgatcgatattcttggtttgatgggtgacacggcggataacgtgccgggatgtgatggtgtcggaccgaaaagtgctgccacattgatttataaatatggaagtatagaaggggtatatcaacatatagatgagctgaaaggcaaacaaaaagagcgcttgttgtgttgtcaggatactgtctttttatcaaaggaactggtgactatcaacacggaagtacccacagaagtgaatgctgaagatttggcattgggtgagattcaagacgatgtgttaaagccgatcttcaacgaattggagcttttctctctggcaaagcgagtgttcatgatagaacacgaggaaaatttggtagagaccattcacccggaagaagttgattaccgggaaatcactactgtggcggaacgggatgaattacttcaaaagttgaaggaggccccggaatacgtgctgaacgtgatctttggagatggcacgatttacaactcttatccggactatctctgtttttcaacagccgttaatactgcctgttatctgcggttaccttcagcaaaggataaggccgaggacgtgattcgtttatttaaacctattcttgaagatcaaaacaaagttttgatctcgaatgacgtgaaggacgatattatttggttaagaagagccggagtagagattctaaataaaatatttgatgtcaagattgcacattacgttctacaaccggatagttcccacgaactggaacgtgttgctttggaaatgctgaattatcgcttgataaaaggagataatacagagaatcctcaattatccttatttcccgatgaaggagctaagaaagacaaggatttcgccgaacgtacggatatattattccgtttgaaagaaaagttggaagaggctttacaggaagtcgggctttataagttgtacgaagaaattgaaatgcccttggtatctgttttggctgatatggaatacgagggtgtgtccattgataaggtggcactggatgagctatccgaggatttgaaaataagaatcgcggagacagagaaaattatatatgaaatggccggtaaagaattcaatattagctctcccaagcagttgggcgagatattattcgaccagatgaatattgatcccggcaacaagaaaaccaaaacaggccaatacagtacttccgaacaggtgttgtcaaaattagaagatgctcacccgattgtaggacatatacttaattaccggggattaaagaaattgttgaccacgtatgcggaggctttacccacgtatattgatccggcaaccggaaagattcacacgcattttaaccaagcggaggcggcaaccggaagattgagtagcttgaatccgaacttgcaaaatatacctatccggacagccgaaggtcggaacattcggaaagcttttatcacgggagatccggattatgggttcttctcggccgactattcacaggtagagttaagattgatggcacatttaagtggtacgccggagctgatcaatgctttcttgaaaggggaagacgtccatgctgcaacggcatctaaaatttatcatgtgcctttggacgaggtgaccccggagatgagacgacgggcgaaaacggctaatttcgggattatttacggcatttcggcttggggattggcggaacggctgaaaatttcccggaaagagggtaaggaactgattgaaggctattttgccctttatcccggagtgaaacgttacatggaagaatccgtggagaaagcccggaaaaaagggtacgtggagacgatcatgggccgccgtcgttatctgagagatataaattcccggaatgcggttgtacggggtgttgccgagcggaacgcggtgaacgctcctatacagggatcggcagccgatattattaagaaagcgatgatatgtattcatcagaaattaaaagaacggggattacgttccaagatgattttgcaggtgcatgacgagttgaacttcaaatgtcatcacgaggaaatcgaggaattgaagaatcttgtggtggattgcatggaacacgttgtgagattagcggtgcctttaaccgtgggtacgggctacgggaaaagctggtacgaggcacattaatgttagaatataaagatgttgttgggaatgttggacaagcaaatagattcagttataacggatagtatcgtgccggtgtcggattctgtggtgtttccggcctctttgttaagagaaacggtctcttggaaacctttcttaccgtttgacacgctgacgaatcaggtggaattagtagacggaattcctttgagcggggagaaaatgaatattgaatttatttccagtattctgatttacacggtcgtgtatctcgtttttatcgctttgttgcgcctgcgaggaagaggttttctcccaacggtgtacacctattttttcaaccggaaaagaggagctagcttgcaatcggaaggcgggatgccaaactatttcttcgttttcttgtcggtttgcctttccttctcgatcttgtccatgttgatggcttttttgatcgatcctccctttgtattctttaatgccttaatctattttctgatcatcttcggttactattttttagtcttgggacttgtgcggcttttcgggtgggcatttaatagaaggcattgtgcatcggagatcatcttgaatttgcgcacaagcgcgatcgtgttgggattatccatatccccgttcgtgctggccttgttttacgtgcaaacttcggcaataaatatgttattatatgtcatttcaggaattggtatcattattctggttttcagatt

SEQ ID NO: 455 - DNA, 3604 bp, Butyricimonas faecihominis
atcatgtactttctaattaatttgaacgtgttatgaaaaatatgaagaatttattattgatgtcttgcttgatattctgcttggcgggttgtcaggattggttgacgattcagccggaaacacaagtgacaaaagaagatatgttcaagacacaggggggattttatgatgccttgatcggttgttatactttgatgcgggataattattctccggatgcgagtatggttgtcgggggagtggagtatatggccaatctttggataacggctacggatgggggaacggcttatgattttgcgtctcatgattatcgggcagacttggttgagatgaatttgtcccagctatttttgaaacaatacgagattattgcaaacgtgaatactttgttggagtatattgatattcagaataacgtattgacggaagatgaagaagacctgtataaaggggaagctttaggtttacgggcttttatccattttgatttgattcgtttgtggggaccaatgccaactgggattgatggaaatcgggactatctaccttatgtgactacggttcaattggagaattatccgtattctaattatcaggaatacatgacccaactttgtacagatttggattcggctgaattgttattgcaacgagtggacttgatcgtggcaaatgataagtcagtatcatatcggcaaaatcggatgaattattatgctgtgcttggtttacaggctcgggtacatttgtggctgggagagcatgatgaggctttacgttacgcccgattagtaaaagaagctacggttgcaggtgagaaaaaacagtttgctttgggggttgaaaatgattttttgcgttatgacagagtgttgtatagttgtgagcaattgtttggaataagtcttgaagaatttaatgataacatgattgcagacggttcttatgctgcttttgaacaaaaaagtactaatctgagtgaattgtatgcggcggaagatattcgtttccggtatttatggtatactgatgatggtgggggccttcgttcttcaaataaatatggtaatatggcgtcatttgacaccgagaacccggcaccgactaaaagtgttcctttgattcgtttgtctgagatgtatttgattattgcagaatgtgccggtttgacagaagcgaatatggtatatactgaatttttagcttctcggggattgacgacaaccgaattgacggaaaataatagacaggaaattattctacaggagtatttaaaggagttttatgcggagggacagatgtttttcgtgtacaaacgtttgggaactgtaaatatgcgttggtcttccagaatgtgtggagaggacgtttacgtgttaccgctaccgttacgggaattaagtacgactgaaaattattaaaagagaagaattatgatacgtaaattaatattgtctttatgcgtgggcttttgttgtttggcttgcgaggaggcgttgcccgattataatacaacttggagtggggttcagtttgttttaggtcaaaccctaaatcccgaaagattcagttattcttttattgggaaagaagatacgaggatgatggatacactttggtttaccgtacgaccgcaaggactgctaccggaaagaagtagccggattagattggagcaatatgaaggaaaggaatggaaatatatttatggggaggatggtgcgattgcggattctgtattacgagtttttccccatcaggcagaagcgggagtacactatgtagcttttgatgatgaacgaatggcggagcatttgactttggagcccggagagttggaggctcaaattccggtaattgttatgcgggatagatctttacaagatacgacatatactctctttttccatattgtggattcggaagatttgaaagcaggggatgaaaagtattgtaatatccagttgggaatagccgattgtctgactcggccagctgcttggaataattggttttttgcgggaacttggagtcaaactcgtcatgagttcatgattaaggtgactggagaggactgggatgatgaatttataaatacacttgatctagaccaaaagaactattatttgtatgtgttcaaccgagaactaaagaaagaaaatgcggcacgagctgaagatggattacctcctctgagagatgatcctaatgatccgaacacggatattattttcccaacagttgcaaatttttaaaatgataaaagtgaaaggtatgaaacatatatattatctcgtgataattttgattgtaggggtgatgtttgtcgcctgttacgataaagataataccattcatcgcattccggatttagtaattgagaatgtgactggtggttccgtgaaaacgggagaattaattgagattactcccaaatgcataatgggtggagaggaggttgaatgtacttataattggtatcgttatcgtgataccgtgctggagttgatttcagaggatactcacttggaatggagagtagataccgtaggttccgtgacattggagttggaggcaactcatgttgaaaccggaatacaagctattctcacttttcaatatgcgatagttccccgtatcaataacggttggttgattttgaaagagactatggatggaaatacagacatggacgtttccttacttcaaacaaacgggattgaatttgcagaagatcaattatcattggcattgggtgggcccatgaaggggaagcctgtttcgctactttctacacaaaattaccagtggtataatccagaaacaggaggacgagaagaaagacaaaactgtttaattcctgtgagcgagaaggatattttgatgtatcgggtatctgatgagaaagtcttggtacagaccgaagacttgttctacgagactccagattttacatcaggtaatattgaggcgtttatgaaattagattattctgccagtttgatttttgatggtaaagtttatttgttatcttcggctgcttttatgcctgctcttttaggagattatcatcttgcaccttatatagtttgttgggggtatagtaatcctatgttggtatatgatgaattaagttcttcttttggacttattaaagcatcaaatataatgaatacgacaatggagatcaaatattttgataatgcttttcaggcggatgatgatttacgaatttctcctagtcaaatgaatgcggatctggtttatcttggacaaacggataggagtattcttactgataagcctggatccggtactgcatatgctttaatgaaaaagaaaggagatgccgataatttattgttatatggattaacagcagcggaatggcctaatgcgacctatggcccgatccgttttacaagaacaattcccatatcgcgttgtgaagcttttgcaacagctgatttttatacaatgcaccagactaataatttgatttattttataaaggataatcggctttcttattacgatattgataaagatgaatttgtaatggatattcatacctttgatggagaggtgacttattgtaaat

SEQ ID NO: 456 - DNA, 3597 bp, Butyricimonas faecihominis
aaagatacgttttattccgacataaaccaatcttttccaaccctttttgtatttttgtattccaattttccacaaacaaaaagaaatacagatgaagatatttatatatgtaatattacttttcatccccacgctatcattcgctcaacgagccaagatcgcgttcgaaaagaccacgttcaacatgggactcgtgcaggaaaacgggggaaaagtaactcacgaatttaaatttacaaacaaagggaaagctcccttgttgataaaatttattgaaaccacgtgtggttgcactactcccaaatggaacaggaaacccattcctcccggagacagtagcgtgatcaccgtcacgttcaacccgaaagatcgccccggcgtgttctcgaaaaagattatcgtgtacacgaacgccactcccccgaacatcgtattgcgtttagaaggagaagtcatcacgaaatcggttgacatcccgacaacctaccccatcgtggtgggtaacttacgtttcaccacggacacgatccacttaaaacaggcagagacgaaacaccaaatcataaacatgatcaacacgggtaaaaagaacatatcgatcctgtcgattttcaaacccgactacttagaagtggactgtacccctctcacgttgggcaaggaaatgatgggtaatctcatcatccggtatctcccgaaacacgcggacaagatcaagccggatgattacgtcctcatcaaaacagatcagggaacgacacacaagttcatgatctcgaacaagtaattttcaattttgtactttcaattttcaattcaatatgatttatcccgaaaattttgaatctaaaataaaattcgacaaaataagacaacttatcagcaataactgcctgagtgacatgggccgggaactggtcagcgccatcaagttctccaccgatgccggatggatcgaaacctctttggccgaaacctccgaattcatgcggatctgtcaagaggaagagaacttcccggtttcctattaccatgatgcccgtcccttcttgttgcgtataaaagtagagggtttgtttctggaagtaaacgagctggttgtcttaaaaaattcactggagtcgctgaacgccatcatgcggttcttcaacaccaaacaagaagtttaccctcatctggtagcccgggccggagacgtacgggtattcccctatatcctgcaacgtctggactcgatcgtttcaaaattcgggacaatcaaggataccgcctcacccgctttaggcaacatacgtcatagcattgctaaaaagcaatccggaatctcccgacgtatgcaatccctgttgcagaaagcacaggaggaaggatgggccgacaaggacagcaacattgctatccgggacggtagaatggtgattcccgtgcctgccgccttcaagcggaaattaaatggtatcgtgcatgatgaatccaccaccgggaaaacctcttatatcgaacccgcggaaatcatcgagacgaacaatgaaatccgggaactacaactagaagaaaaacgggaaatcacccgtattctccggcaatttgccgacgatttgcgtccttatatatatgacctgattccggcctatgatttcatggcattcgtggatttcgtgcgagcaaaagcactctttgccatccgggtgaatgccatcgtccccctttttgaagataccccttccatgctatggtacagggcaaagcatcccctactctacctaagcttgaaagcaaacgggaaagaggttgttcccttggatattgaaataaatgaagatcagcgaatcatcctaatttccggtcctaacgcgggtggtaaatccgtctgcctgcaaacagccggtttattacaatatatgttccaatgcggcgtacccgtacccgtggaagaatccagtaaattcgggatattccacaaaatactcattgacatgggagacgaacagtctcttgaaaatgatttgagtacatacagctcgcatctggtaaacatgaagaatttcatccgttacgcctcgcgggatacgcttatcctgatcgacgagttcggtacgggaaccgaacccatgctgggcggagcgatagctgaagccattttaaatgctttaaataataaccaaacgagaggtgtcatcacgacacactacaccaatttaaaacattttgcctcttcagcttccggaattgcaaacggggccatgctttatgacagccatcggatgttgccgcttttccaactggagatcgggaaaccgggttcgtcttttgcattcgaaatcgccaagaaaatcgggttacccaaagagattttggacgatgccgccagcaagatcggtgaagaccgggtaaatttcgacaagcacttgaaagaaatcctacgggataaacgttactgggaagaaaaacggaaacgcatccatgaaaatgaaaaacgcttggaagaagtgctggagcgttataaaaaagaactggacgatgcctccaaactccggaaaacaatcatccaagaagcccaagagaaagccaaagaactcatctccggggcgaacaaaacgatagaaaataccatccggcaaatcaaagaaagtcaagccgaaaaggagcaaacccgactggttcgccaaacattcgaggaagaaaaacgacggttactgttcagcgaagaagaagaggaagaacgactgaagagaaaaatcgagaaattgaaaaaccgggaaaagaaacaaaaggaaaaagggaaacgcacccaaacctccacgtcggaagagaccgatcaacagcaacaggcgccgactttcagcaaaggagatctcgtgcaactggataataaagccgtgggtgaaattatcgaaattaacgagaaaaacgcggttatcgctctcggcggtctcatgactaccgtgaaagtggaacgcctctcgaaaatatcgaacagtgctgccaagaaaatcacgcaaaacaggatgccacgcccctcttccaattatctggaaaacatcagccagaaacgcatggatttcaaaccggagatcgacgtacgaggactacggggagacgaggcgctcatgaaagtatcggaattcattgacaatgccgtcatgctaaacatgaaagacctccgtatcttacatggaacaggtacaggagcccttcggcaaatcatacgggattttttaaagaccaatccggtcgtgggttcctgcggggatgaacatgtacaaatgggaggctcgggaattaccgtggtgaaactggatatataaaccacacgcggttatattccggataaatccacatccttgatattctcgaaaacgagggcaaccaacaatacgagaattgttcaagaataccctaaattcgtgtttcaacactcacggatttaggggtgttctacaaaaacttaatgcaaaataatgtaaaataacgttatcaaaacaggattatcttgttatcatattgcgagccgctcccattccgctcccattcctcccctattccgctcctatcaaaataacaatatattagattaccatagtaattattaacatt

SEQ ID NO: 457 - DNA, 3545 bp, Butyricimonas faecihominis
aaacgtaacaatttaattccaaaatccatactattcatttaagaaaatcctaactttgcaagaaggtaaataaaatgagtacttatggaaaataatgacatcataaaaatagcccgagccaaagccgaaaaatggttggacaaggcatacgatgaaaaaacacgcgaagaagtaaaacgcatgttggaaaacacggacacgacagaattgattgaatcgttttacaacgatctggaattcggaaccggcggtttacggggaatcatgggagtgggaaccaaccgcatgaacatttacacggtaggcgctgccacgcaaggtttttcaaactacatcaacaagatgttcccgaatgaaaaaaaagccgtatgtatcggtcatgactgccgtcataactcccggctcttttcagaaacagccgccaatattttctcggccaacggaatacacgtttacctgttcgaagacttgcgccccacgcccgaaatgtcatttgctatccgggacttaggctgtaaaggtggtgttattcttaccgcctctcacaacccgaaagaatataacggttataaagcatactgggatgacggatcgcaactcgttcccccgcatgataaaaacgtgatcgatgaagtaaaaaaagtacaagtctcggatattaaattcgaaggagtaccggaaatgatcaccattttaggaaaagattttgacaaaaaatacttggataaagtgaaaacattaagtctttcaccggaagccatacaaaaagaacacgatttaaaaatcgtctttaccccactacatggaactacctacgaacttgttcctgcctctttacataactggggattcacgaacattcataccgtaccggagcaaagtattcccgacggggatttcccgaccgtggcatctgcaaacccggaggaaccggcagctttcaaaatggctctagacttggctcgcaaaattgatgcagatttggctatggcttgtgacccggatggggaccgtattggtatcgccgtaaaaaatgacgcgggagaatggacgctattgaacggaaaccagaccaatattattttcacggaatacatcatccgcagaaaaaaagaactgaaccaacttaaaggtggtgaatacacggtaaaaaccatagtcactaccgagttgattaaagacattgcagaaaagaatcatatcatctgttatgacgtgtacaccggattcaaatggattgccgacgtgatccgcaaagaaggcggggagaaattcatcggtggcggggaagaatcttttggctacatgccgggagcatttacccgggacaaagacggggtttctgccacgtcattaatggccgaaatcgccgcttgggtaaagatgcaaaataaaacactgtactctttcctcaaggaaatctatgccaaatacggattctcgcaagagagaatgatttatatcgtgcgcaaaggtttaagcggggcgcaagagatcaaagccatgatggaagagttccgccacaacaccccgaaagagattaatcatagtccggttgtgttgaaaaaagactacctctctttggaagcaacaaacctacaaacgggagaaaaaacgcacctcaatttcgagacgaaaagtgacgttttgcaattcttcttggccgatggtagtaagatttccgttcgtccttccggtactgaacctaagattaaattttactttgaagcccgggcccagatgaaagatatgaatgactatgaacgggtgcagcaggatgcgaacgcccgtattgatgctattatcaaggatttgaagcttcaataaaaagcataaaggtgtcaaaagtcatttttcaaactccctccccccttcggggtactccctctataaacagagggagagctgaaatactctctattttcgggaaaatactctctattttcgggaaaaatcaccagcacctcctctgtttatagaggaggtggcacgaagtgacggaggagtttaataaatgacttttgacacctctcttttatccctccatctcgatcatctcatccttgaaattaatcaggtataattttttgcgggcccgggtaaatgccgtgtatagccaacgccaatactcatcgtcataagaatcctctcccagccatcccggatcaacaaataccgcatcccattgtcccccttgggctttatgacacgtgactgcataggcaaatttaatttgcagggcattataatattcgttctcttgaattttcttaaaccgtttttgcttggaagcaatatctgtataatcctcttccacggccatatacaaccgccgataatcttcataactcaatgcaggttgttccgtggtcaaggtatccaacatgacccatgccgtgatctcttcctcgtaaccgtaaatacttagacgagtattgacaaaatggaatccgtataaatccttatatttcccgaccttctccacagtagcaatatccccgttcgcaataaaatccaccttatcgtactccgctccccagaaataattattcttcacgatcataactttatccccactactgaaagcatcttcccggtaaaggattctggcccgtatcccctcgttaaaacgattggcccgtttattcgaccgacaaatcaccatcgtttcgtccatcccaaaagagctataacattgatctaactcttccagtagttcactcccacttacccgtacaatatccggaaaacccgctacccgaagcaagagtttggcaaaaggtcccgccccgatcatttcccgtacccgagtagcattatacagaatcccggattgttccgactgccgcataatatcggtcaagtttgcctcatatatctccattccgtaactcacctgcaagaaatcagcctccaaggccgggctgacatccacgccaatcgggggtaactgggctgtatccccgattaacaccaagcggttattcctcccgttgtacacgaactcaatcaggtcatccagcaaagaccccgtcccaaaattcgaatcctgagaacccattgagatcatggatgcctcatccacgaaaaaaagcgtgttggcattcccgttaaatcccaagttgaatattccgactccctcctgtgcatttttctgccggtaaatctttttatgtatcgtaaaagcaggctgatgagaataaccggaaaacactttcgccgctcttcccgtcggagccaataaaacaacctgttgttcaaattgcagtaatgtattcacgatggccgccaccaaagaagttttccccgttccggcatatcctttcaataaaaacaaactttcaggatgacgatcaaagagaaaagctaaaaaattcttcattgccgcctgttgcgtgggcgaaaaatcgaatccaaacttctcttttacaatacgttcaaaatgttcatttatcatcactaaatttaatagacaaaagtgtgctgtgatcttttttttttttatatttgccgacacgacaatccattaaggatttgttctcggt

SEQ ID NO: 458 - DNA, 3543 bp, Butyricimonas faecihominis
atttcctttatatattatttttatccgtcttgttcacggcttgtgataaggaagatcatttgacaccgtccaatgttggtcgagattggttcacgatagaggattcaaatgatccggtagatcatgcgatttatcaattttacacggagacaggtattcccgtgttttataatgatacgattggagaagaaactcgttttgatcattgggggaattcttatacacattatgaaatcctgcaatttggaagttcttctctcggtggaacagaaacacccaatcctttcagttcttacgagttgtgtccgaaagaggacgttgtcgatgggttagaattcttacgcgaggagatagtgcctgttttacctgagagtatcaagattactagtttcttgttgctgaaatctttgactccttggaacccggcggtggtaagtaatgaggcttttaaaggattgaatacggtgcttatttcccgtgtttcagagttaaaagatatgagcgatgcggaacgtctgaatatgaagggtgccatttttaatgccgttcttgccacgcctgtttccggttatacggaagagttggctgcattttatcaggcaacccgcagttgttacacggagaatttatacggttgtgccggttggtatttttacaataggtatggattctctgacccgagagccgttggcttcttgaaggatccgaatcctagtgattatggtagtatgcccacggaggttcaagatgtaggtatgtatatcaaggcgatgtttatttacacgccggaagaatttgaagcgttgtacgggacgtttagtgtcgtgatgacgaaatatgaaattatgaaaacggtattgcgggatatcggggtctctatataggttatcaacttatttataggatattactactaactgaggttgactaaaaagtcccgattgtcgttcaatgaactcctccggccttcggccacctcctctataaacagaggaggagctggtattttttcccgaaaatggtgagtaatctagctctccctctgtttatagagggagtaccccgaaggggggagggagtttaaaaaaggctttttatacaacctcatggaaaaagtgtagcgccttattggcaggaaaaggatgttttgtattgtatcatttagaaagaactgaaatgaaaaaattgttattgatttatgtcgggattttttgttctgtgctggctttcggacagacaaatttccagaaattgacattagatgaggcttgtacgaaagcaagagcggagaaaaagctgattttcgtggatctttacacctcttggtgtgccccgtgtaagatgatggcggacaaggtgttcccagatgtaaagttaggagcgtttatgaacgagcgtttcgtgtgtgtgaaatatgacacgggagctgataaggatggttcggaattggcgaagatgtttaatgttcaggcctatcccacgtttttgatcttgaacgtggataagggattggaaaaccagattgttggggcaacccttgaaccatcggatttcatgaaccaagtcgaggcggcgctgaaagcttcgcttgccagtttgggacagcaatacgagaacgggaatagagacgtttcgttccttaccgattatttaaaagcgttgttaacggcctccatgaacgagaaagctcaagaggtgtgtgtggcattatttaaggtattgcctgatacagaaaaatcaaatcgggagtattggtttatttttaaagatcaggctttatctccggtgggttctcctttcatggatttcttgttttcccattttgaacaatttacccggagcatgggagaagaaaaagtgttgaaccggatcgctgaagccttcgagattaaactacgtgacatgatccgtggacgtgagcctatggatgatttggataaggttgccaaacagatggccccgcatcattttaactcacgggagcgtatggatacgtatgtcgctttggggaaagctttgtgtgaggccagaaaggataatagcgaaaaaggggtggagaaattactggaattatgcgagaatgaatttcccaagattgacggggaacatctggtgtatttttattttcccgtgacaatttacattgccaatgttgggacggaggcgcagtataaacgggtatgtaaacttcacgagtacgtgtatgaacataccgagcataatcctttgaagataggcttgggaaatatgctttctgggacgaagaaaaacaagtaagattaattttataaaaagaaggaaatgaaaaaattattatcggtgtttgtgggactattatgctccgtcgctgtttttgctcaaacagattttcaagagttgtctttagaggaagcttgcaagaaggcaaaaacggaaaataaacctatattcttggattgttatacctcttggtgtggcccgtgtaaaatgatggcaaatgaggtcttcacgctgaaagaggccggtgattattttaataagaactttgtctgtgtgaaaacggacatggaaaaaggaggcggaccggctattggtaagcaatacggtgttgatgcgtatccgacctttttgattatcaatgcgaatggtaagttaatgcataaagtggttggagcgatgcctcttgaaaagttaatagagagtgtagagatcggcttaaaagccagtagtcttgctgaatacgaggcattataccaagccgggaaactggatttgacagaacaaatggcgtactggaaattactttctgtttcaggtgatgttgtcaaggctcaaagtgtaggtgataatctttggggaaagcttacggagaaagataaattgagtgccgcttattggcctttgttacaatcaagagcgacctctttggagagtgaggaactgaaatttgtttgtgccaaccgggggcattttgaaaaggagataggaaaagaagaggtcggagatttgatttataattcttttatgtcggaattaaacttgatgatcgtgtaccaattgcccgcaaagaaatatgataagattccgggtattcgagatttacttgagaataacgacgtacctcgtaaggatgcactttttaaaatgatagacttggcggaagcccggggaaaatatgatgcaaccggctttatggatgctcttgatacaaatttggatgtattgaatgattccgaaaaaagttgggtatttgaaggtgcaaatctgtttatttcgatgttcaaagataaagcacaactgaagagactgggagagatcgctattcgtgaaaaagaattgatcagagacgaggtcgctaaaagcaaggttactaaaatagcttttaactttagacgtgcgggcaatgatggggtatattgggagaatttgaagacattaagagaggttctggcacaagctgaagtggaagacaagtatgtatttttggattgtcacaacaatgggcagaccacaaaggcgattgatgatcaactctttacgcagaaagaagtagaggatttactg

SEQ ID NO: 459 - DNA, 3534 bp, Butyricimonas faecihominis
gaataagttagagaagttagtgtaattttaaaacagaagaagttgaaaataaagaagatactagtttcgcagccaaagccgacaaccgagaaatctccgtattttgatttggcagaagaatttggattgaaattagaattcaaatcatttataaaggtagaaggtgtcacggcaaaagaatttcgtcaagaaaggataaatattcttgattttaccgggatcgttttcaccagtcgtacggctatcgaccatttcttccggatctgtaccgaaatgagggtaaccgttcccgacacgatgaagtatttctgtatatcagaggctattgctttctatcttcagaaatatatcgtgtaccgtaagagaaaaattttctacggggacaagaaagtcgaggatatgacgaaaattctgttaaagcacaagaccgaaaacttcctagttccggtttccgacgtgcataaagaaaatatccccgctttgatggatgaactacacctgaagtacacgaaatccgtattctataaaaccgtgtccagtgatgtagcctctgaaattccggatttgaaagagtatgatatcttggcgttctacactccggccggtatcaagtcattgttccacaactacccgaattttgagcagggttcgacaattatcgcggccttcggggaggcgacagccgaggcggttgaggaggccgggttgaggcttgatataaaagctcccacggaaaaagccccttcgatgaccatggcgctggaacagttcattaaggcttacaacaaagaaaataaatcaaaataggaaaatggacatcaaacgatgtccattttttgtatgtttgcactcgtatatggatgaaacgataaaatacacgttttgcaaggaagaacggctatgccggaaggggggattcgaggaacttctgtcctcgggctatagtttcgtgtcttatccgttacgagtggtaatccggttatacccgagggaagagaaagatttcccggcccggatagccgtgagcgtttctaaaaggcgtttcaagcgagccgtgaaacgtaaccgggtaaaacgtttgattcgggagacctaccgtctgaataaaaatacattgtactcttctatcccggaggataaaacgatggatatattgttcatatatttgcatgacgaaatttttgaatatggtaaaatcgaaaaagcgataaccggtgctattaaaaaaattaggagctatattgaaaaagatagtggtggggatattgctgatacccattaaattttatcagttatgcatttccccttggacacccccgagttgccgctataccccgacctgttcacaatatgcggtggaggcgttacggaaacacggtccggtaaaaggattattccttgcgataaaacggatatgttcttgccatccatggggaggttcgggctacgatccggtgccgtgaaatttgttattttgttggatatatactattttcgctagattgttattaaaataagattatgagaaaaaatacacgtgtaattatcttcatttcgggagtcttgttactggctttcgggatgcttggcttgaaggaagacgataaaagattccagattagtaagggattggatatttttgccacgcttttccgggacgtgaatcttttttacgtggatgacgtgcagccggagaaaatggtgcaggacgggattgacgccatgttgaagaaactggacccctacacggtttattacccggaaactaagttggacgagttcaagatgatgacgacgggcgaatacgccgggatcggttccgtgatcggtatgaaggatgattacgtggtgatccgcgaaccctacaaggggtctccttcttacaaggccgggttacttccgggtgatttgattctggctgttgacggggaaaatatgaagggaaagaatgtcgagtacgtgagttcccgtctgaaaggacaacccggtaaagaggtggtgcttaaattgcaacgtgtcggggaagaaaagcctttggagaagcgggttcttcgggaagtcgtacaggttcccagtgttccttactacgggatgctgaataacgagattgggtacatctattttaccggtttcacggataaggctgccgacgacgtgagaagtgcgatcatggatttgaaaaaccggggagcgcagtcccttgttctcgatcttcggggtaacgggggtggattgctggatcaggcagtggagattgccaatttcttcctgcctaaaggtttcttgattgtaagcacgaaaggaaagatgaaacaatgggataaggaatatcgcacgacgagaaatcccttgttgccggatatgaaactggccgtgctgatcgatcgggcatctgcctcagcctcggagattctttccggttcattgcaggattacgatcgggcggttgtaattggtgaacgttcattcggcaagggattggtgcagactacccgtgatctggtctataacacgaaattaaaggtaaccacggcgaaatattatattcctagcggacgctgtattcaagcggtagattattcccaccgtaatccggatggtagcgtgggtacgattcccgattctttaatgaaaccctttaaaacgaaagctgggagaacggtgtatgacggtggtggtatcacgccggacgtgaagattgaaccggagaaatacgctaaagtaacccaagaactggtgttgcaggatatgatctttgattttgttaatgaatatgcggcaactcatcccacgattgcagctccttctgaatttgttttgtcggatgaattgttcaacgagttcaaggaatacttgaaaaagcgtgaatttgaatacgagacagcctcccagcttgttctggaaagattggtaaaggcaactcaagacgagaaatactatgatcaggtgtccagtcaggtagagcaattgaagaatagtctcggacactctattgatcgggatttggatgttttcaagaaagagatttccgatatattgtccgaccagttgatggaacgttattacatgcaagagggtgtgatagagtatcatatccgtaatgacaaggatatagctaaggcgctggaggttttgtcgaacaatgaagagtatcaaaaaatattgaagtagcatgaaaaaatagatagtagttttttgaaatcccaaaaaactactatctttgcaccgcaataaaacaattgccctattgtgtaatggtagcactacagattctggttctgtctgtctgggttcgaatcctagtggggcaacaacatgaagaaaacccttatagttggaaaactgtgagggtttgtttttttaatgaaatttgttgattatcagtgctgttacttctcttttctattttgtctgaatgatctgtgatattaggattaagggataatttgatgtagttctagtatcattttaggtatcatttgttgttttggacaataattttcagtatcatattagtattctaattatcagtat

SEQ ID NO: 460 - DNA, 3521 bp, Butyricimonas faecihominis
attatgaatagagtataattatgtgttgggaaatagaaagatactagcccggaaaggatcaacaagagaacgatcactggacggggttctttttgcgccccaatatcacttggaatatatccaatagcgagtaatatgcctatgcctattttcaggtatagaatgttattgaatattccaaaaagcgaatttataatgataaaaaattcgtccaaaagggcttgattccaaccgatggatgctattaacggataagcatacgtgtaagtgccaaataatagcaaaatgcaggcagcgaattttggaatatataataatttaaggagggttttacgatctagttcattcatatctttggcttgaaaactgaatgtgatgtaaccaggatgcgctgatcatttggcaacgcatcctagtgggatatattgaggttaattttattccggaacaactaattcggtccaatactctctttcttcttgtttgaggagaagaatattatcatcaccaatttgtacggtgacatcttgtgattcgagcctgatggcttcataagctccttgtttcagtttcgtgtggtttgcattactgacgcgtggaggaacttgatttataaatatgtatattcgttttttcataggactgtttttaagcgtgtatttattattcttcgtttgttttagggagggagaaaaaatctattttttcaagaattacctcgatggaggatttcttttctcccgtggcagcatcctcgaatgaattctgatttaaacagcctgttattccaattaacttcccggactcaacgtatttctcaactaactcggcatttcgagagaatgcaacaatcgggatccagttcgttttttcttccttttgtccgtttctagtgaaaaattgtttaacggcgatagagaaagtggcgatcgtttcatttccaccttcagactttcgaatagtgggttgttttccaacgaatcctgataaagatacattgttcatgatgttgaattttaattagacattgatttttataatcactttaccgactccaaggtagaatcttgtagtattttggtatttattaattcctggtactggttaagagttgatgagtaactcagagcaataaaaagaatgataaccaacacgaaagccgctatgaacaggtagtaatatttcagccaagaattcgtcatgatcttgtgctttactcctttctccacgacacgagaaaaatctttcatttctctccccacgaggctcatgaacttgcaccctagattaaatgcttccatgttggtacatccgttaattctgatggtgtacatgttattgtcatgaggatgtatggaaggctcgtaattggcgttcacgggagaaatagattcaaacgcctgaataaaataatcaagttcgctttttttaatatcaacataaattgaattcatgataaaagggttaaaaagttaataagtttttctatctctcacgacgtattcaacattttccgccacttgaatgattttttggatagatatgtccaacaccctgaattcatgcggaattcgtccttttactttatattgataattaacttcatgtgatgttgatgataccgggaaggtcgttattatcgggatctctagtgtatctcgattgcttttaattttcatcaataactctacatcgaatgaatttcgagatgggatatccgtgttgatcgagaaaaagatgtttttcgtgttaccgtaatcttccacgttagaaagagaatctacaaacacgtgtattttttttctattgatcgtgtattttatccgggattcattcacgatctcacttccttttagaatggtcaatacagcattatacgtgccaggttgttcttctttcaagtaatacgcggtaattgcgttctttagaaacgcgtattcgatgttgtcaggtttattatcacggatcatgttcccgatagaatcaacgtgatacaagggataaacgggacttgatgacgtgaaacgtataaaatattcttccggtgattcttgtcccgtgattataacaaagggaatgtgttctcccgattggtattctttctcgttagggtgtaaaacttttactagagttggtttaatgatggaatccggagtttcttttaaaacgggtgatacattgtttacgatattacgaatactatcaaacagataaccgggtgcgtatatttccgggtagttgttaattagccggatcgtgtcatggataggtgtagaaggtttcgtttcttttttcaagtgttcttctattgaagaaacttttgaatcgatctttaccatctccatttggagcaaatccttcacggcggtgattactttgagggtaatgaatgtaaatacaaccgcgatgaagcatgattgtataaatatcttagaggtcttcatgataattcaagccttaaaattaatacgaaatacttctctcggtggaagttgatccacgggagttaaatagaaaaatagtattttatcccgactgatattttaacgtgaaaatgagagaaagcagtattaaacaagtaaccaacagaaggttcaatatacgtgcttatctttcccaggttaaactcggcttgcgggtgaaatacaatccccgtgattattttatttgtagatgcttgaattactccggatggaagatttttatttttatatttttcttgtcctagaagaaacccgcctcctaggttgacaatgaaagattttggcatgtatttttccaaagagtaaaaatatgcgaaatcgcctattatactatttgtcggtaacttccatttctgggatttattctcaaaatggctatatgaaagacgtaacctcaaaaaagaaagggatttacctagatacttctctacttcaattccaccaccgaaaccacggtaaaaacttccgtgtccgccgacaacccattgaccgtaatacttttgtgcctttgttgttaatgaacaacacaccatacctattataaggcataataagaatttttttgctaacattttcttcattttataggacttctgcaaaagtataagttaatgttgaaaattcaaaatattcttaacctaagatgctgttatataaaaatattcttttgtttaaagcgagaaattattagcaagttaagagaaatttaatgcttgatgttttaatctaatcaaacggactcttcatcctatcctcgacttatttatggtgcaaatttcaatacttaatttggcttaacaaggtcaagcccttcgggttttcaaaaaaatagctcctttcaggattatttttatttgaaaaaccttgatccccagccaaattaagtattcgaaaagcaccgaaataactcgatgataggaaaaagaacagtcgggaaaagaaaaatcaaagatccagagataaataaatgattttataaacattaaaactacaagaaatggtttcaattttagacatttacacgggagcaaaggtaag

SEQ ID NO: 461 - DNA, 3515 bp, Butyricimonas faecihominis
gttttagtgaagcaataaatacgtatttttgtatatcataaaacgataaattatgggcaaaaacattttgattttagagggaagtccccggtcaaacgggaacagtgatatgctggcagaggcttttgccacgggtgctagggctaagggatatgacgtgagcgtgataaaagttccgggctacaaggtaaacgggtgttttgcctgtggtatgtgctggtcaatgggaacaccttgcgtgcagtcggatgatatggagaagatttttccggagatagaacaagcggatatgatcgtgtttgcttctcctctttacttttttagctggccgactcagataaaaagcgttatagatcgcttgtatccttatgctttggagaaaagtgaacggagtgtggcaggtaaggagtgtgctttgttgcttgcagcggcaacggatgtacaggaagaggcgaaaggtatgttggaatcctatcgaattttggcagaatacatgcattggcattctgttggtgaggttgtagcttacggggttgataaaaaaggagatgttcgaaatacggcgtatctcgaacaagctcaggagttaggttctcgttaaatttttagaagaatccgggaggaggtgttccttccggacctcttccttctttctttttaccaatagagttaaagcgataggaaaccgttagcatgtagtagtttcgctcatttgtactgtaactggtttgtgtgtataggtcttgaatactgtaatttaacaggtttctttgacgtaaaatatccattgctttgaatctgacttggagttgttttctttttaggaattttttcccgatctccatgttcaagaggctattggattggttcacgtttccaccttttttacttagtgtgtagctatatgaataatcaccggcaaggatgaattctttccagaatacccatttggcacttgcattgactgattgagagaaagaactggaaccttcagtggtcgtactcgtggaattggtgtaagaggtacgggaagatatattatagtccaaattctctgatatgttgctattgatgttaagaccgaatgatgcgttatgagagttcgtcaagttctttatattatcgtagatagaaggagtcctagaataactgtaagataacgaaggacttaatcttaattttaaagatttgatttcaaaggaataactggaattcatggaaagtccccattgaccgtttaggtttacaggtcgggtgaggcgtgctccttgtaatatctgataaccgttgataaccgtgtcttttgaaataaattgtgttgcagtggcaatattgttaaatgaattccggaagctaaggttgacattcaagaaactgaaattttcttcactgacaatattccggttaaaagacatggaggctgattgcgagaatgtttttttcaagttcggatttcctgtcgaaatatttaattggtctctcacgtcaagaatatcttgtagttgctcggctctgggggaatccgtgtttccgttgtagtagaaagtcatggttgactttttagaaaagtgatagctgaaattcacttgaggggagagattcaggtaattatttctcacgttagagtctggtgcattcagatattcgtatttgttttcttctcttgatagattgatagatccacctgcactgaaataaaatttttcttgattgtacccgtaacgaatacctaggttattacttgatctaactgtactaattttattcgttaaagccgtatcgataccaatgacttccgtgaatagagcatctttgtaagacatactttctttgtcggaagtattcttgttgtagctaaaagagtaattaaatgataatcgggccttctctgtcagtggttcggaataggagatagaacccgtgtatgaatttgagatgctttcagaggtgttgataagattccgtaatgtatcttttttgtttatgatactactatcttgctgggtattgttatttttgcttttaccgatgtttatgtttccatttaatgttagggttcgtccggttttttggaaagcgtgcatccatgagaagttacccccgaaagaacgattttcactatgactttgatttttactattcgtgatgtttatcgtgtcattgtcttgaatgttactgttcatgtttaatgatctgctatctgatttactgaatgaaaaagaaggggtgaagtagaatctgtttttcttgttcatggagtagttgaagcgagtattcacgttgtggcttgagctttcggaccacgagtgtgattcagaattgtatatgttactttggtaactttcagaaggaaaatattcttgaatgctggagttggcagaatatgattcactattgctaccactgtaacttcctccgatgtcagttcctttcttaaatgtgttagcaaagtccacggagtaactttttcctcggttatttccccctttgccgtgatattgtgcgttgggaagctcggaaccttgattggtgttacgtaagcttccttgaatggagaatttttgctttttgttgaaggcattggctgaagctcctagattatagttgttgtctttaaatgaatcttctaggtcttctgagatgccgtatccgaggttggctttaccgaacacttttaactggttgggattcttggtttcaatgtttaatgaacggaatcttttcccgtcgtcatatcctgagaaatcagcttcttcacttttcccgtcaaacatctttatcttgttgacgaggctggccggaagtgtttgaagtgcggccatcgggttgctaaggaaatattcggttccatcaatatagattttcttgacttcttccccgttcgccattaattttccgtcgacgatttggaaaccgggtaattttttcaacaaatcttccaattcagcatcctctggaaccttcaatgcatttgcgttgaattctgtcgtgtcacctttttggatgattagaggtggttttgcggtaataacaacttcttccaaaacttctggaaggagtttgatcattccgatatttgtatctgctttcaccagatattttttgcttgtcgcttgatacccgacaaaagaagcggtaatgaccagttcacccggaagaaggtcttttagggtgaattctcccatggcgttggttacggtagttggttttttgtcttctccaatgtaaatgtgtgcgcccggcagagtttcgtcatcagtgtctcctgtgacgatcccttttagtgtatatttgactgcttttttttcaggtattgtggctgtatcttttctaatcgtgtcttttttttgcgtttgggcaaatattgtcacgggcatggtcaacatgaacaaaagaaagactattttgtagatatgaagttgcatattatatgttgttgttctgatttaaacaaaaatagacatataatatggatgcaccatgataataaaagggtttatgatttctttaaatac

SEQ ID NO: 462 - DNA, 3506 bp, Butyricimonas faecihominis
caataactaatatattcttgaatttcatacgcataattttaaaaacttaaattaatacctactgaataagttctttgaatcggatagttgaatccggacgaacctaactccacatcccaaagatcaaaatcgctaatcaaaaaaggattattcacccggatataaggtttcaaacgttgcaaaccaatcttctccacccatcttgtcggcaagttataggctaattccaatgattgacaacgcaaaaattttacttcacgcatgaaataggttgaagcacgtaaagtctcctgcccgattctggcctcttccatattatgcgtggtaatactacttgttgacaaacgaggccacaatggattggatttcatgttttccggagtccagtggtcttcccaaatcgcacttaacagagcccggtcatttacgaatggggaaagtgatgaaggctctatgaaaagagaacgtttggatgccccttggaacgcgaaattaaactcaaaacgtttatagctaacagttccgttaaaaccatacacgaaccttggctccgtgggataaccgatatgcacggcatcatcaatactgattttcccatcaccattcacatcccggtagcgaatatctcccggcatataattaccggattgaataggtgaacgatctatctcctcctgactctggaaaagtccttctgcaatatatcccacgacctgtgaaatatcatgccccacttttccctgccattccggtttatcagccgcctcttcaatctctttaaaaaccgacttattataggtggccgtcccgtttaaaataaaccagaaatcattagaaaacgcatgttgaattttcccagagacatccataccacgggaacgaacttttccgacattatcaaagggataaagccctaaacccatgctagcaggcacaatcttacgagatgataatatattatgacggatttcttcataaaaatcgacggtgaaatccaacaaacctttaaaaagcgtcacttccagtcccaagtttgtctgttcggcaatctcccattgaatagtaggattagcatacgaataaatcacatactgatctgaactattgatccctacattctccaaataaatatatcgtcccacattttgcgtgtaattatctgtcaccgcatctccaataccatcattcccgaccttaccatacgaagcacgcactttcaggaaagagagccaatgtccggttgcattagcaataaacggctctttggacaacatataagaaaaaccaatggaagggaagaaaccaaaacgattgtgttttgcaaaacgctcggaaccattatatccaaaacttccttccagataataacgttctttatatccataagaaagtcgcatagaaagccccatattacgattttttattgcagaaaataacgtacgtccggttgacgtggtacgttgagaaagattaaataaccccgtgtaactcacggtatgatcaccccaattcccattataaaatactcgaaattctcctgcaacctgagtttctccttccgtaaccttatcattaggattaacagtcaaatttttatctccttctgtaagctgttccaatgtatgttcaccagtctggtggttataatccgccaaacgatattgataaggtgtagtttgaaatggtgtactataataggcttccttatacaaggaaacattagcacgtgtttccaacccttttagaattgctccccaattttgaatatactccacacgatttaccgtagcaaaacgacttctctccagataacccgcttgaatagaagcataaggattattagaatttttcgtttcataaccaaaccgaatgtgtgggaaaccataggttgcatcagcaggataaactgcagcatagtccaccggattggcattaaatgccaacgaataagccccttgtacactagaaagagggccgcgataggcatctagagttgaattagagttaagcactaatttggcactcggcgtcatatcaatattcaaattaatacgtaaagccgtggtattatttctaatattcacgtcaaacgaattcaaccgatcggtcttcaacataccttcatcatagttatgactcaacgatgcgtaatattgcataatctttgtaccccctcgaacactcaaacccaagtgatgattgattgcggtatttttaaaaagaagtttataccagtcattggcagggtacacccaagaagggaaacgatcactacccgtgttattgatacgctctgccgtatattttggctgtgccaacggatcacgggtttgcaaagcttcgttgtaagctcgcatataagtaatgggatctacaacatcgattttcttcgtcggcatagaagcaatagcctcataacggaaagccgtataaacggatccttcagctcctttctttgtagaaaccaaaattactccgttggctcctctagcaccatacatagccgtggcagaagcatcctttaacacgctgaaagaatcaatatcttccggatcaatacgagacaagtcaagtacagacacctccactccatccaacaaaatcaacggagccgtattagcattattaccgaaagaagtaataccacggatagagaattgagtctgcatctcctcttctctcaacgcccccggcattcctcctttcaagtaaccgatcatacccggaatacgtcccacgaaacttgcagtaagatcactgttggaagtcttcagtgaactcacgttcacggtggttaccgcaccaaccacactttcccgtttctgctcaccgtaagcaacaacggtcacctcttccaaggcctcctcggtaggttcaagtgtaacatttagaacggttttcccttcaacaggaactgtcgcatctctataaccgataaacgagaatttcaacacgtcatcagccctaaccagaatatcataatttcccttattatcagtagcaacccctcgtgaagtctgattaatcaccacactcacccccggcatgggatttcccttctcgtccaccacacgccccttcaccgtgataatatcccgtgccaatgactcttggattttcggctttttcttgacaacaatcaccttaccctcgatcgaataatcgtaaccgtgagccgtaagcactttttttaacacgtcatccagtgtcgcatttgtaaaagtttccgtgattttcacctcgctggatatatcgttttgcttatgcacaaaagtatatcccgtctttgctttcaggtcttccagtacttccagaatcgttttattctggtacttagccgtaattctctgttgccgagaagattcattctgtgcatacaaagacactcctgacaacaataccaaaattaaatttactaacataatccgaccccatttccgaatttccactcgaaaaatggcgtgactccatttttttttcatatttttgtatttgaattataagat

SEQ ID NO: 463 - DNA, 3482 bp, Butyricimonas faecihominis
ggttagatctatccctataaagacaactgattttatgatcaaattgataaataacgaatatggagttatgaaaggggtaattaaaaatagtgttagaaatacgatactaccgagtaagataggggagagaaattgtttccctaaatgaatgatagaacgacgaaaggtgatgtaatacatttggtaatagcattgaagaaaactgattgaaaacgtgatcgtgatactccaggctacgccatccagtgttttgaaaataaataatccgacgcatatacctgccacgttgatgattgatgagaataacccacataaaaataggctctttgtgtcgttggatgcttggaaaatggagccggaggtagacatgatgatttgtatcccgacagaaatagataatatttgaaatattgatacagagggcatccattgttcaccgaatacgatcaaggtgatttcacgtgccgagaaccaaaggaaaacagataatggcaacccgatgaaagctagtaaacggatgattttttcatatgcacctgccagatgatttaaatcatgctgatagtctgaaaagatggggtgcatcacgggagtgatgacatgggtgatattttgtaaaggaagcatcatcagccgatatgatttttcgtaatatcccaagggtgacattcccatgtatttcccgataaggagcttgtcgagatttcgactaaaatagttgatgatattgaatatgaactgataagccgagaatttgaatattttccggatagaagggatgccccaggtcatttccagtgtttgaggatatttttgataagatatgataaatagtaggatactggaaagaatgggatttataattaaagcataaagtcctgctccaccaagagctgccagaatagcgattatacctccgcttacttgcacaccaagacttctccatgcgagaaatttgaaagctttcgctttatacaatagggcattcgggacaatgtttgctgatgcgaagaaaagatttatagctaatagctgggtgatcgtcttcatgctcggttctttgtagaaaaaggaaatcggccatgagcaaaggaaaaataatagtgttaagatacacccgctccataccgtgaatgaaaacaattggttaagatctttttgttgaagttccttgttttgtatgatagccgctcctattccgaggtcactgaatatgctgaaaaaaaaggtgataaccgttactacggccacgataccgaatttatccggggatattaatctggcaagtactcctgtaataatcaatgatatgagaatacccgaatatttagcaatggctgtataaaaaacaccggagagtagctcttttttaatcgaacccataaaattatctttttagtagagatttgaaaagtaacacgcaaattgttttgcaattcacatatttggagtagtctattagggcgcatttcgcaatgtaaagacgttgttttgcgggtagtctaaaagcatttcgtatggcagcgttgagcattttagataagtgattatgaatgatttctcttacttcggcctgtaaatacgtgtagttttttaattcatttgccacggtaaagtatccttgaatattcttcattgaaaatggacgggtggtgatagagttttttcttactcgtcttttgaaaaaagttcgttgaatatattttactcgtgtagcatttaaatataacagagccgtgtataattcatcttcatgaataatgtggggataaaaccgaatattattttttttcaggaaacttgaactggaaaaactaagacaagcagatgtccggaaattacctgtttgatcctgtatctttaacaattctgtcccttgccaaacgttatcggatatttgcaaattgcgttgatattggtagtttcttggacatgtattttcagcatagaaactttctgcatcgaaaaagacaaaatctaatttttcggcaatacatttctgataacatatttccagtgcatctttttccaaaaggtcatcactgtccatgaaataaacaaattctccagatgctttttctagtccggtgttgcgggatatggataaaccttgattttcttgagagaatatttttattctatggtcttgttttgatagttccaagagtagagaaagactattgtctgtggaaccatcatttatgataatgatttcaatgtcatataatgtctgtttttgtattgattcaacggtttgttttatgtataactctgtgttgtatacaggaataatcacgctgactttaaatgagttcattatattctaaatatggttactattattattgacaaggggaactaattcttgtgtccgttcccatgttttgttttgaaaattgtatcgtttgataattttcgcaggattgcctacggcaacagaataatcgggaatatttttggtaacaacgcttcctgctccaatttggcatcttttaccgatatgaactcctgcaacgatgactgagttggccccgatatgggactcatcatcaatgataacttctttttttactaaagcctgttcgttagaatcccgttctccatcttcatatccatgattgaaaccggaaataaagacatgttgtcctaagcctactttattgcctagatatacgggacctataatgacagagccgatcccgacacgggcattatcaccgataatgatattgcccgctccgttatttattgttgtaaaatcttcgataatcgtgttattaccaatagagaactgattccacgggaacacgtcgatacgtgattttcttcggcggatgatagccccttttccttttttgtgtacgaagggattaatgaaccatttaacccagagacgaggccggggattattcgcaggggagattgaccacatgataagcctcttaatttgagtatttctttttataacagtttttaatttatcaaacatttgatgtgtttttatagatctttaattccatagttttctgaataccaaaagtctgtgggagaatttattttaaaatgatttttaagacctccatagaaatcttgtaaaatacttatatcaggcccattgtttgcttcgatgacaactggaccgtcttcggtataggcgatgtcccaaccaatatattttatatcgcaaaatttgaaagcgagctttaacgtgaattctacaatcttgtcccagaatggaatatggaatccttcaaatttgaaattagtataagggtgtgctagaaacttttcctgattatttgttagggcatatttatagagttctccggtgtttggatttacttttgtgtaaagaccacctgaagttgcgttatcaatttccattcctccatgtcccattcttaatagtgcgaataaaatttttattttagagttatcaatacattcagttacaattctaaatgtatttattgaaaatgggt

SEQ ID NO: 464 - DNA, 3475 bp, Butyricimonas faecihominis
caacaatgatttttatcggagtttgacgaaattatgcgtggtagtagtttttcttgcatggcgatgagaatttgcggatgaatattggaaaatagtaattgaatattggatgattttaaggtgtaaatgtagcaaaatagtaaaatttatgtcttgttttgtggcaaaagtattatctttacaatctataacgtatgtttggttgcgaaaaatacatgagtgtatgaaagtcttgcaaattcttatattgctttttttgagtggaatgttgggatgtgttcgaaatgctaggagtgagacggctgcacccccggaaatcaaacaagttttgtttgtcagctcctatcattccgaacagatttggggacgaaaggtgttgaatggagtgagaaagcagttggaaaagatgcgctataacgtggatctaagggtgatttatttggattccaagcgtttgacgaatttggaggtgagagaatctttactggaaacgcaattacgggaaatacagggtaaattggatttgattatcgtttcggatgaggaggcgaataatgcactttttgcgttggatatgcccttgctggaagagactcctatcgtgttttgtggggtaatggcgtatacaggaagacccggtcgtgacaacgttacgggagttatttgtgatattgattacgagaaagtatttttactagggcggaagttgttcccggaagctcgtcaggcatacgtgttatcggatcaaacgggagctggtcaggcacatcaggctttggcccggagacaattagccgggtatgcagaccgtttcccgatcgttttcagtggagatacggcttttagcgtgaatgattttttggatgaacttcggaacgtgtacccgctttctttcgtgatcttgaccacgtggcagcaggagaaacagggaacgtatcttgatccggatatttactattctatatatgccagtgaatgtcccgtgccgattctcacggttattgataacggtttgggaaaggggatattcggggggatcgtcacgtttgccgaccagatggggaggcatgccggtagtattgcggttcggattctgaatggcgaacgggtggaatcaatacctgttgatactgtttgtcccgtgcccgtgtttgacgataatcagttaaaaagatggagggttgaccgggcagaactccctgccggatgtttgattttgaacgagcatgtgtcgttctggcgtgtttatgtgaattacattattattgtcgggatcgcgtttgtcctgttattgttgttggtaacatttttgattttgtcgcatttgagatacaggaggatgctccataaaagtgtttacttggagaaagcaacgcagcagattgcggatatgttgaagaagaaaacagaattattgaccaacacgctgtcttctatgagtgaggggattttagttgtggaccgggatttgcggattgtcgagttgaattatgcttccttggttggcttgggatgtggaagtgacgttatcggtaagcctttgaaggatgtttgtgaaataaaccggaatggcacgggggagggaatagaagaattggcatggaaggttatacaggatgggaaaaggcaggagttggcgttaaatacggtgctaatcccgtgtggtgcccccgtgcagcaggtggcagggagcatttctcctttgctgaacgaggggaatgatgtgaatggggccgtgatcatgattcgggatatatctcgtgagtggcggcaacaaacatttttaagaatttcgataaatgctttgcaggcatattcatggtactacgatgttgaacaagacgtgttgagaatgggggaaggtttttgggaggatgaatccttgaaggagggattgaacacgattgataagctgattgatcatattcacccggatgatcgggatgagttgcgttcgtgtttggaaaagatcaagaggcatgatcttcgggaatttgttggcgtgttccgggtgtattatcatcgtacgggacggtatcgttggttggaaagccgtggcattgtcgagacggtggagatgagtaacgggcgaaaagtcatgtacgtgtatggcatggggatagatattagccgttacaaggagacggaggaaaagatggcattggccatgcgtaaggccgaagagtccgatcgattgaaatcggcgtttgttgcgaatatctcgcatgagatacgtactcctttaaataatatcgtgggatttgccaatttaatgacggaagaagggtttctggcggaagaaaagaaagtattcagtgacacgattgcccataatagccgggcattattggggttgctggatgacgtgctggatctttctcgattggaagccgggatggataaagtgtttttccgtgtttgcgatatgtatttcttggtacattccatggtggatgtggggcatttgaacgtggcggagggcgttgagctggtgaacaaggggccggaaaaggagctgttggtcgttacggatgaggtgaagttaacgaaggtgtttatgaatctggtcggaaatgccaagaagtttaccacgaaagggcatattgctatcggggcccgggtgtccgaagatgaaaaatggattgagtgcgtggtggaagataccgggatcggtatttctcccgaaaatctggaacatattttcgatcgtttttataaagtgaacgagtttaaacaaggtaccgggttagggctttccatttgcgaggctattatagaacttctgggcggtcagatccgggtggaatcaactttaggcgaaggcacgacgttttactttaaaattccttaccgaaagccggaagaggaggatatatgattgtccctgtgagaattgtggtggtaaggttgtggtttcgcttttatttcggcctcattgcctgttactttcgtatcaaagacactcgctgaacgtctttgatacgtctttgatacgagaatgatacgtcattgatccctgtcttctacctgaattcaacgggttttgttggtttgtttatactgaattccagtcgacctgtttatgatgttcgtatttaaagagcttaaatataatgatttattttttaagataaagtgaccactttttgaaggagaggtgaccactttggtgaccagttggtagcaaataaagtgtaaatgatagcaaatatgatatttttataccttgtttgtctgaatatgcttatgatttgagatggcgtgtctaagtcgttttaaaacaagtgtttatttaatagaaggcttgagcttttgcatgaaaattgaaacttgcgggtatgaaaaaaaccagtatttctactggctttcagcttcttggctcctcaggtaggacttgaacctacgacctacggattaacagtccgccgctctaaccaactgagctactaaggaattttctcaaaagcgatgcaaa

SEQ ID NO: 465 - DNA, 3469 bp, Butyricimonas faecihominis
accctagtgtatatcttgtcgctagcgggtagttgttgttcgagtcaacgccggtaacgatatctatggattccggatcggggcttgaagaattggtgatggtaaacacgttctccacggacatgaacacacgggcgtaatgtttggattgtttcgggaacacgggtagggtgtagccgatcgagatactttttagtttcaaataattgattttttccacgttacttttcaaattcgtggcgaaattattcttcccgttctctagttcgttgatcggaaaatcggtattgtcaccgggtttctgccagaaagaaaccttgtcaagatcggctagaatcgggaccatcatttctgccgtgtttgctctcaggatcgtaccgactgaagctcctcttcccgcattcaaaacgtgtcttcccagcttgtaagagaacaacaggtttacatcaattcctttccatttgagtgtcgtggcaatccctccaaatgcgagcgggagaggggaacccccgtatacccggtcttccaaaagcggaaccatggttgcaacctgtccattcccgtcgacatcctgtattcgtcggtcaccgggagtgtaaatctggtttcccaaggacgatagatatttccgtctgccgttgacatagtagagtggcacttcatcttgtgaattatagtatccttggtcgttatagacgtaaattccattcaacggtttcccgatgatgtttagattatgtttgcttgctagattcgtgaagtccatgccattgttacttttttcaaatcggttccagttgcgggcaatattaaaactgaaatcccagtgcagtttttccgatcgaacgaggtcagccttgatttgtagttcaattccttgattcgagatcgcgtaagcattttgccattgggatatgtaggcattataatctcccggtagggtgacttgcgccaatagcttgtccgtgtatcgatagtaatagtcaagctcgaaactcagcctgttaccgaaaaactccaagtccagtcccgcgtcaaattgtttggtttcctcccagcttaatttgggatttattaatccgtccggccagtaaggggttatggtttggttcccgtgaaaaggaacgttgttgactattaacaccccgaaagcgaaataaggatattcaaattgtttcccggacttcccgtaacttaatcggactttcccgaaatccagaaaatctcgggcccaatccatgtacggttcctcggtgaacgtgtaggcaatagcgtatgacgggaatgttccccagcgtgtgttttccccgaactttgagctggcatcccttctgagcgtgacggagaggaaatacttctgtttgtagttgtaggctacccgtccgaacatacctaccatcgtgcttctttctaggctggaattgaaatcctttaattgcaggtctttctcggtgtcatacacgttaccgctccacgtgacgtattgtatcaggttacttggcgcgcctttgccgtatccgctcttgtccttggcgatgtctccttggaacgagagaccgagaaggaggtcaacactatgattgtcagcgaaaatcttgttgtaggagagtagattctcgtttaaccacatcatcttgatcgtgttgttgcctgccgagtagctgttgagatccgtgttcaggtcggagggtatgaatatattttggtcttgcatggagaaatcgacagcgagagacgatttcagtttcaagccttccacgatcgtgtacgccagatcgaacgatgatcttagcctgtaagattcgtttttctccttaatctcgttgaaacgtcggaccgtttcatcaaaagccttcgttcccggaccgggcatgagggtagaggtcgaaagcaattcatccggaatggtttccaagtcactcctgtcattggagaaattataggcatcatgccctttgcccgccctgtttcgtccggtacgagccaggtaaaaacggatgttactttcaacgctctcggagggtttgataaacaagttggtgatgagtttaatcctgttaaatcccgtgtttcgtagcacgccagtttccgagtaatatcccagcccgacgtgataagcgatcgtgttggagcctcccgatagttggatattggcatcggttactttcccggttctgaaatagtaatcgaacaagttcgtggaattgttgtagaatttgttcaaactatcttgcacgatgggaagatccagtccatcaccgttgttccagaataaattgtagttcttgttgtttttgtaagaatcttcgtaggattgaacagggcggtacatgttcgtttcttcatcataaacggactcccggtaattttccatggcttgcatcctgtgtcttcgttccctgtttcccgtggtaatatccggtaacgaggggcgagtaacccatgtttgggatatatttaccgtgaacgtgggagcttgattccggtgtccttttttggtggtcacgataattaccccgtttgccgcacgagaaccgtaaattgccgcggaggcagcatcttttaatatttggatggactcgatgtccttggtgtcgatctcggcaatcgtgtttagcccggtaagctcggaggtgtagctgaacatgggaaccccgtcaataatccataacgggtctgaggtgatacgttctttctctacagccaacgagttatatccccggataacgatgggggaaccgccaccaccgggggctcctgtaatgttcgtgacatccaccccggccgcccggccttgtaaaaggttattgatagaaggggaggggagatccttgatctcgtcagccttcacgacagacatggaaccgacacgattacggcgtgattgttccccgtaggcgatgacttgtacttcatcaagctcggacacgtcctcttctagaatgacattcagtaacgtgtctgccttactgaaaggaagcgtttttgttttatacccgataaaagaaaaaacaagacgtcccttgttgagcgggaggaatatccggtaattcccgttattatccgaggaggttcctatcagagtgctatccagtcgcacggtgacaccgggcaacggtccttttttcttgtttaggattttcccctttataagatgtttgacaatagaatcctgttggatcggattcgcttgcaaaggctcgctttttaccatcaaagggacgtaagcgaagaacgcaaaaaacataatactggctacacgcaaattcaggatagatttgcgccgacaatccatttttttcatacttttgtatttaagttaagtgacaggcgaatacgcttgtctcgtttttgtaagagggtgtttgagcaccctcttttttaattcagagtgagatcttacccctcgcttggtggtgggcgtatttttaaagagtttgataatttgtgttgatgctgcattttatgt

SEQ ID NO: 466 - DNA, 3445 bp, Butyricimonas faecihominis
tatgaaaactagagggtataaatagttggtagcttgctataccctcttttattaatttcctttccgtatatataccgttcgatcctttatttcaaacttcacattcacgccaagttcaaaaagagaaagaaattcctgtatattggtgaatttatccagatttccagaaaactctaatgccttcaatgtactatcttcaaatacgacctctacattataccatcgtgataatgttttcataatcatgtctaacctctctccttggaaggataatcggttatctttccaaccgatataatggtttacatttattttccgaactatcgactggcaattttctttttcaaatatcaactgttcttccggtttcaaaattactgatggattcatcccatcatcaaatttcactttaccgttcaccaaggttgtgaccaaagcagactcatccgaataacattttatattaaattctgttcctaatacctcaatctttccagattccgtttttacgataaaaggagcagactcatctttcaccacgtcaaaatacgcttcaccacttaaaatgacttcccgcttatcaccggcaaacataatcggatatttcaaatgtgaatccgaattcatccatactcgtgtaccgtctgacaatactaacaaatataaaccaccccgaggaactatcaattgattaaaaacagtggtatctggcattgtccgtttcaaacgattatattccaatcctgttgagtctgcagcaatcaatacattcccggcctcttccaaactacaatgccctttccccaacacgacttgttccccatccgctctcactaatatcgctttcatctctgccggaagaatgttttcctgctttgcgatcatattcgttcccggtaataatacttcgacttgtttccactgtaacaatatgatacaaacaatagctacacacgctgcactagccacccacataatcatccgcacacgctttttcctctccacctgacgtttcatccgtaaaaaagcatcttttcctgaataatatttccgtttttctaacttctcgctcacatactccgcatccagtaacttctccacgataccatctttatcctcctccacgtccttcacctctgccaacagatgtcccatcgctttatctacaaccatacgtgaccgatcatatatctcttcccatttcatattatttctgcctttattttgacaacagacactcaatatgaaaaaacgggtgacaaaaaaataaaaaaaattagttatcctacacgaaaaataatccggcaattaccatccagacatcccctaattgctcacgtacaaaagcataagccctctttttttgtgtttttatagtattttcagaaactcccaacttttcggccatatccttcaccttttcccctttcatacttcgtaataaaatatctcgctgttgttcaggcaaacggataatcacggtgtaaaaacgggtaatggcttcttcctccaaagccatttctacagcatcacattcatcactaatgacttgtcccatccacacctcatgtgccttcttacttctcttctgatctcgaacaaaattaagcgcagcattgtacacggcacggtacagataagcagttatcacttttatatcttcaaaacagacagttgaaagccacaatttcacgaaacatccctgcaccacatcctccaccatttgatcattccccataatttttgccgcatagcaacatagtggagcataaaaataatcatatagctcaacccaagctttatcctctttacgattaaccccatctaaaaattgcctgtattccatcacaactctcttaaatctcacaaatatatcgattccaatattatctgcaaaaatatagttgtaaaaatcaaagttcgtaaaaccctccatacattaggccagacatttgtgccacttttcttcagaaaccatctttcaatgaatacattatcattccatatttaaaaaattgtattgtcctgaaaaaagtttactataaaccaatttcaggaaattacattccttgtccccccaatcattgtaccggaatacaaatttcagtgatcaaattttccggtgtagtatggtccggatgattcaagtacttttcgaaaccgggggtatctcccagcttataccctttttcgggaatccattttgcataaatcgtatcgtagacggcatgaaggttttcatacggtccttggtagcggaagatcgcatatttcccgccgggaatttcttttactcccacctctcctttcggtttcccgacacggggtaacacgaggcacacggacgtgcgcaatttatcctgctccgttaccttcggatcatcatggtaaacacagatatgctccacgtccggggcaaaaagattttcttcccgcacgtaattccacagtttttgccatgcggcacaataatccaactggttatatgcacctgtcagccaaacgtaaatcacttgtttcggggccaacacctgttcttcaaattctagtttcaaatcgggtcttacttctactggtttcataatcgtgtaatttttattattacggtatccattcggcgaaataccatagaattgcttgaaacttttcgacaaagaagaaggcacgtcatacccgacccgataagcaatgtcctgcacgggcaaatcggaatagcgtaacaagcgagctgcagtctcgacacgtacccgggtgatgaaagccccgacaggctctcccagaaaggcccgcacgatccggtggaaatgccaaggagagaaaccagacatctcggctaacatcccgagatcgatattctcatccagatgattgttgatatattccacgatcacgttgatccttttcaagtactcttctttcgttgtcaatttctgttccatattcttttgtatttcgagacaaaggtaagaccctgaattgggagagacttttccgatcttgctaaattagtttgtaaggttctctacacctcccccttcacaaattgaaagtccagccagtaagttgcccgctttgccgtgaatttcaaaacacaataagtcgggtcgttcaccccgcccgggaaatgctcgataaaccaatcctgccacaaggctttcttttccgcctcgtcggtaacaatctcgatgtacccggtcaacacgacactgttaatctccttctggaaacacactcccgctttaggattcacccgaaagtgttccgttttctcggaatacgttccggtagcaaaccagatagtagttatcccttccgttttcacctttgacatcggcacaggacggggaaaaccgttttcatcaatagaagtcagtaccacactttcgcattgctccaataataattccgcttttcgtttcaattcttccatatatccatcttattt

SEQ ID NO: 467 - DNA, 3407 bp, Butyricimonas faecihominis
ctatgatatagactttaaaaagaagtattttccattgaaattgttgattggaaaacaagtgggccggatgaattggggagtactggaggataatgcggccttagcaggtcttagttatttggctttaggaaaaatacgggaaggggtagagaatttatcagaagaagagttgagaagcatgcgcgagtcaactaacggagtgttctggcaagagtatctattacaaaatggtattattcaagttccggagagtttttatgaagtgagtaaagggtattatcaatcgtttttggaatatttaccggaaaatgagggtgtgactgatgtggatgtaagagattatggtttctggtatagagatccttcaaattcttattcattggtgacacctaataaagaaggtgattttaaagattttatgggagtaattctgacggttccttatgaagagttaaaacccgtgctagatgctcatagtaaattgaaagataaatatgacatcttggtaaattattttaagatgaaatatcagattgatcttgttgctattggaaataaacagtttaaataatcaagaatgaatgtaaggacaggaatactaatctttgccggtttattactggcaaagactagtgaagctcagttgtttggcaaaaagttgggagagttgagtcccgtgacaaccaagcaggattcggcggtgagtgctagtaattatgccgatattttaaaagatgcggaggtgcatgaagggatgtttaaaatattcaagaaaaaacagaaagtgtattttgaaatacctcaatgtttgttggataaggaaatgttgctttcttcacgggtaacagctacaagtaataataccgacgtgtcgggaggagaaatgcctcttcatccgttattggtgaaatttacacgggatgatgaacaagtgtatttacatcggttgagtccgttgaatcaatgcgacccgatgtccccgatttatcaatcattgcaaagaaataatgtcgagccaataatggaggcttttaaaatcgtgtgtgagaatgcagattctaccggaattgtgattgatgtttcttttttcttttgttcggaccagaaagaattaagtccttttaaaccgcgaaccccgttgagttttattcttggggagaatcctttggaggggagtttttctagtgataaatcgacgatattagaagtgaaatcatttcctttaaatctgaacattaaaagtcggttagtgtataccgttgatgattatccttttacagctattatgactcgttcgatcattctgttaccggatgagcctatgagaccgcgtatatctgatgtccgaatcgggtatttcccgttacgaaaacatatttatacggaaaaggtggacgagttgaaaaaagtagattatatccaacgatggcgaatcgagcctaaagatgaggatgtggagcgctatcgtaatggagaacttgtggaaccgaagaagccgatcgtgtggtacattgatcccgctattccggaacgatggagaaaatacattaagttaggggttgaagattggcaagcggcctttgaagaaattggttttaagaatgcgatagtagctaaagactatccggtggatgatccaaattttgatccggatgatattcgttactcgtgttatcgctatattacgacagaaacagccaattcaatgggtccggcttggattgatcctcgttcgggagaaatcatacaagctgatgtattattctaccataacgtgataaagttgttgcataattggcaatttgttcaattagctcaggttgaccctaaagtgaggacaaaagtgtttgacgaggaaacgatggggcgagcattgcggtatgttgcggctcatgaaattggtcatacacttgggttgatgcataatatgggggcatcttatgcttacccggtagattctttgcgttccgtgacatttactcggaaatatggaacaactccttctatcatggattacgctcgttttaattatgtggcgcaaccgggagacgaaggtgtaaatttacttcccccacttttgggtgtttatgataaatacgccataaaatggggatatgcgcctattgcagtagagagtccggaggcagaacgtccgattctgaatcaatggatacaagaaaagcaagatgatccgatgtatcattatggacctcagcagttttctttgttttcgattgtagatccgtctgctttatctgaatctttgggtaatgattgtatgaaagctaatcgttacgggattgaaaacttgaaatatattacgagccatttgttagaatggacgtatgatgaaggagagacttttgagaaaccagaagaactttatcgggaaatattcggtcaatacaggaggtatattgaacatattctcgtttatttgggaggtgtttatttggatgctccggttatgggtgatcaaaagaaagcttataaattcgtgagcaaggaaaaacaacaggaagcattagcttttatattagaacaattacgggcattcccagattggtattgtcaacctgaaatagaacgaaatttctcattcgggaatacaaaagtggcagagtatatgggattggttgttggttctttaacgtcaagtggtatattatcaaatctttcagtatgggaaaaacaggatggtaaagatgcttatacgccagtcgagtatatggacgatgtttataatctggtgatggaaccaacgctaaaacgtcaggatcttaatcattacgaacgggtgatgcagtacaattacatcttgtcattaatgatggctgagggaaaagggattacaggagagaaaggacgacgttctttggttgaaggtgatcatgctgatatatgttcttgttcgacgagccatttgcatgaacgtatggctatgagtccagtcgatggttctgacacgagaatagtggcgaatgctgtttatcattatgagttggaaaaagtttataaattactaaaacgagtaatgaattctggagaccgggatacacgggcacattatcgtaatttgtatttcgaggtatcgaagtttttcgagaattagaataaggacgagattgattgaaaagttaaatttttggtcaatctcgctaatacaattttccgttgtctagtcatacctttgaaattttcttaaaatcaagtgtatgggacggttatatgtattaatttttttgattaagaaggagcaatcagaaaaattagtttccaatgatttccgaggattttattgatattacgtgttaacgaatttgtcgaggaaaagagatcggttaatattggcatccaatttatagataaatttgaacaaaacattcatttctgtatcagtgtggagt

SEQ ID NO: 468 - DNA, 3400 bp, Butyricimonas faecihominis
atgatgttattagcaataaatacaacaattgtcatgtcaggggtcatcgtgttcctcatcgtaacactgattctcgtgggcatgcttttgttcgccaaggccaaactgactcccaaaggagaggtgaaagttgacattaatcatggcgaaaaggaattggtaaccgaaccggggtccacgctgttggccacccttggaaacaacaaaatcttcctcccctcggcttgtggaggtaaaggttcatgcggtatgtgtcgttgtcaggttgaatccggagcagggtctatcctaccaacagaaacgggattcttctcctacaaacaacaacacgacaactggcgcttggcttgtcaggtaaaagtgaaagagaatatcgagatgcacattccggaagaagttctcggaatcaagaaatgggagtgcgaagtggtttccaacagaaatatctctactttcttgaaagaattcgtggtaaaattaccagaaggcgaaaacctgaaattcaaatccggaggatatatccagattgacgtgcctgcaatcgacgttgacttcaagacgttcgatattgacgagaagtacaaggctgactgggaacgcatgaaaatgttcgatcttaaaatgcacaacccggaagcaacctaccgtgcttactccatggccaactccccggcagaaggtaacattatcatgttgaacattcgtatcgcgactcccccgtttgacaaagctatcggtggttttgccaacgtgaatcccggtatctgttcttcttacatcttctctcgcaagccgggagataaggtaagtatttccggaccttacggagagttcttcttgagagacacgaacaacgagatgatgttcatcggtggtggtgccggtatggcccccatgcgttcacacatctttaacctcttccacacgatgcataccaatcgtaaagttaccttctggtacggtgcgcgtgctttgcaagaggctccttacgtggacgagttcaacaagattcaagaagagaacccgaacttccactggacgctggctctcgacagaccggatcccgtggctgacgcggccggagtggcttacaaaccgggtttcgttcatcaggtaatcttcgagaattatttgaagaatcatgaaaacccggaagatattgaatactacctctgcggtcctcccatgatgatctcggcagtaaccaaaatgctgtacgaccttggagttccggatgaaaacgtaatgtacgataacttcggaggataatcaaaataaaaaaagctgcttttacaagcagctttttttatttcaaatgacaaattactttttcaaaaacatattcttaaattcaatcgcttcaagcagtaatcccgaatttacttgattccggggaagacgattcaacagagaatccgtcatctggatgttcccggccaccttcttctcgtagatcacgttatccatgataaaagcataattctgcggatccccggccagatgaaaaggcgggcgttcaggatcaaacaaatcccttcccatggaataatcttccgccggattcttcactcccagcacccgtttcattaaagtcggtgtcacgtcataatgagatgtcctgtgcgagtacacaccgggagtatttcccggatagtacaggataaacggaacatgcacctgtgcgttcgagaaatcacttccatgcccccagaaattctttttattctcgttaaactcttgcccgtggtccccggtaatgacaatcacggaattatccaacaacccgttcgcctccagtttattcaccacctttcccacaagcgaatcgacataataggcacaatttcgatacaggttaaagaatggttccggatccagattattatttaaagccaaataattggcataatcccacgaaggctgaaatttcttacgatagggagccggaatatctatcgcgtgcaacaaatcgtagaacacgaacgaaaagaaaggttgatccacttcttttcgttcatccagataattcagaaaatcttccgtgatcctgttatcccggtcaaacggagttgcccccggtgtttccttgcgaatatctttcacgttcccgaagacgatgcgataaaaaggaggattaacaagcgtcgcactggcgaacgtctctatatcatacccattttccagtaagttctcgataaataaaggttgtactcccgtacgttcaaaatcttgccagtacgtcgcggaaataccgaaaaacaaaccgaatatcccaccccgcgtaccattactggaactcaggtgacgattgaacaccgcggaacgatcgccaaaagcccggatgttaggacaacactcccgtgtaaaagtcctaaaattccacgaatccaaaataagataaatgatattcaacggtttcacgctatccgttttttccagcggatgcagaggatacacgaaaccatgccctttccccttatccgggttattcacatacaaatcttcctttttgaccactcccaacttcaacatcaaacggttggccgtcaaagggtaatattgcggtaaacaagccgatacttccgtgatcgaattcacgttagctgccgctgcataagcatgggttaactggggtgcgatacaggaaaacagaaacagataaatcccgattttcacctgtttcgaagtaacataccgggcatatcgataagcaataaaaataaccaccaaagtaaacaataaaataagtaacccgataaaaaccccgtgcaggaccaaggtatcattaaacacgaatacttggtttcctccctcgccaaaagccagatctagcacgaacccgttaatatggaatttatacaactggaaaacaatcccgttcagataggccaacacgttcaataaaaatatagcacaagtaaacagcatggtaccgaccttccgcatctgccgccaccacgcgaagggaagatataaaacaacccaaggaatcaaattgaaaagaaaagcttgtcccagtgccgctatcaaataataaaaacccccgacgaaattcaaggattcccagtaattactattcacgagataaatcacaaattgaacgagtaacaggcaagaggcacacatatataacagaaaacccctcttcaaataattcactttcccagcgtaaaccattgatttagaatcattaaatgtcataaacgattgtattaagaaatgatcatataatagttgcaaataaaaagcattaaatcgacttttcaatcattttcttaaaaattcattctcaattatttaattctttttcccacctccttgtgagcaaataaaatggatgtcaataaacgatcgtttattgacatccattacatcagacaaaaacccctattgataggag

SEQ ID NO: 469 - DNA, 3398 bp, Butyricimonas faecihominis
gagtatggaagaatttacgatacgacttctactgacccagttttgaaatatatttctcaatactattataagttcggaaagttgttgatagtcgatcctgatacagccgattatatttttaattttcaatccaaatacgatgtacatattgtgcctcctaaacaggaaggaaatcatattgagagaggattggaacttttgaaagagttatttttgaatggatatagcgatcaggtaaagcaggaattatttccttatgcacttattatggcagataccattgaaaatacgtttaaagatgaatacgtaaacatatataccgcagatcgctatattgcttttctggtgaatgatcaaatattggatagaacggaaaaaggaaaagaggaactttccagagaatggaataatacttttctgaattatagtatggataaagtaggttgggttgttccggaagagttttatctttattcagaaactgaatatggtaataaggaaaattggtggattcctatagagggagctactgagaaagatacagcagatataaatatcgtttgggaaagaggttaccctactggaaattggacttattattatgatgatacttggacgaataaaatatggggatatgcggtatcttcaagccgaacgggatatttggaaaaattctttgaatttttgtttacgacacctcaagaaacgataaataaggctgttgcagaccatgaaaaattaaggaaagcacatgatgttctagatcaggcattgaaagatgatttcgggattgattatagaaccatggtttataaagcaaagaattagttatagaaagaatgtgaaaataatttaggtataagttatgaaaagattattttatgtgtttgttttactgtgttttactttaaattttgcgagcgcttctgatgagttgtggggaaagaggaaaaaaaagaaggatacatctgaaaaagttgaatctagggattctacctcaaaaacatcttccgagagtgcatacgagaagtttatgaaagaagctacggtgaaaaagggaatgttcaatgtaatcaagaaaaaggataaaatttatttggagattccgaaaaaattgatgaaccgggattatttaattagttctcgtgtttcctccacgagtcgcacgtggcagattgatccgggaacgattaatcgtacaccattattaattacgttctcttgtgatgagaataaggtgtatatccatttccctcatttggattacgtgtgcaaagagtcgtcggaaatgtacgaggcttacaagagacacagtaacccgccgatctggaaagcgtttaaaatcgaggtgatgtcaaaagattcttccaattgtgtgattgatgccaccccgttgttcttgtcttcgattgctgagttttctccattcccggatcttccggctgaagttcgtatgatagtcccgtttggaggttcttttcagagtgatcgttccaagattgaggagttcaaggctttcgaagataatattatcgtgaagagtatgatgacttacacgacggataaagaaggtcctttgaccacgatagaggctcgtaacattattattttgccggagaccccgatggttccccgttatgcggacgaacggattggcttttttgaagagtctcgtaaattatttgacgaacatcatgatcgtttgcaacaatacgggattatcaatcggtgggatttgcagcctaaagatatggataagtatctggctggagagttagtagaacctgtgaaaccgattgtttggtacgtggaccccgcaattcccgagaagtggagaaaatacgtgaagttgggtattgctgactggaatatcgcttttgaggctattggttttaagaatgccattgtcgtgaaagattacccggtggatgatccgaattttgatccggatgatattcattataattgctatcgatttgtgacttcggcaaaggagaattcaatgggaccgtcgtggattgatccccgttcgggagaaattttgtgtggagacgtgatttcgtggtacggtgtggtgactttgctgaacaagtggagaatgatccagaccggggcggtagatccttccgtgcgttgtcccgtgatgacggacgagaatatgggagaagccatgcgttacgtggcggctcacgagatcggtcatacgttagggttaatgcataattttggagcatcagcggcttacccggttgagaagttgagagacccggagtttactcaaaagtacgggactaccccgtcgatcatggattacgctcggtttaactacgtggcacagcccggagatttagagaaaggtgtaaagttgacacctcctttaattggcgagtatgataaatttgctattaaatacggttatcaggtactcccgaacgtgaagagtgcggatgatgagaaagaaattttgcggggatgggtgagagaacagataggaaataagatgtgtttttacgggaaacaggtgtttcaatttaattttgaccctcgttccatggcagaggatttaggggatgatgtggtgaaagcaaatacttatggtcttaaaaatttgaagtacgtggcagctaatttcgtggattggatagctgtaaatgacgagggatatgctgcggtggaaagtacttataaagagattatcgctcagtttgtccggtttatggatcacgcgatggtgagtgttgggggaatgtatattaacccgaaatattacggtgatccggagcctctttacgagtatgttcctaaagcgaaacaggttgcagccttgaagttcgtgctgaagaatttgaacgagttgcaggactggattattaatgataaggttaccgctattatcggacctacggccaagcattacgtggctcaaacgcaattcttcaacgagttgttgacaaaagaaatgttaggtcgtttgcaaataaacgaggtggacggaaagaatgtatttacgttggatgagtatatgggaattatttttgacgagatgtttaccaagaaaaccggaaatttgaagctggcggatatggcatttcagaattctttcgtggagaacttgaccggttacatggataaaggagagttcaagagtgcggggaggcattcgttgagagaatggacgaacgagactacttgtagttgtcatgcttattgcgagtctcgtcatagttttgatgccgtggatcctctaggtgaaatcgtgttatccccgagaattgacaagtcaaataagcgtccgatcgtgatgaagtatttgcgaaaaacatacaacacggctaaaagtcggatgaatacaggaaatgaaaaaacacgtgaacattatcgattattagtgttaaaat

SEQ ID NO: 470 - DNA, 3398 bp, Butyricimonas faecihominis
atgtaattatttattgacgcttcttgggatactgggaattttattctcaagtgtaaaggtgtctgatgcgcaaatgacggttgccaaaatcgatcaacagcctgttgaaaaacaggcagaaaacggaattcgttttttcgaaggttcatgggaacaggctttggctgaggcaaaaagtactggtaaaccgatatttatggattgttacacctcttggtgtgtgccttgtaaaatgttggcgacaaccgtgttcacgaagaaagaggtcggggattattttaactcccatttcattaacgtgaagatggatatggaatccaaagagggtaaaacgttgaataaacaatatgagatcctaggttatcctacattgctttttattgatgggggaggtaatatgtttcatcggattgtcgggactacgcctgcagagatactgttgaaagaggccgctcgtgccttggacgggaatggatatagcgtgatgaaaaagaagtatggagagggtaatcgtcagccggattttatacaagagtatatggaagtgttgagtgttgccggggaagataaggttgctgcccgtgtatgtgtggattatttcaatacgttggagaagtctagattgaaagaaccggagtattggaaactttttcaaaaatatgtaaaagatgtagatgctggcatctctaagtacatgtataaaaatcgggaagaatttatcacgcttttcggggagaaagaagtaaatcggaaattgtatcaattgtatagtgagggggcttaccgttactggaaggatgatgtgtttgacacgaaagggtttgatcggtacacgagtcaattaatgaagaccgatctgaagcagagagaacagattatagatgaggctcgtatgtattatgccatgaaaacgaataattggcaagaatatattcggttgggaaatgaacgaatcaagaaaggattgaatgacgatttcatgatttataattgggggttgaaagtgaatgttttgtgtaaggacatggtgttacgtgaagaggcggctaaatggcttgatgtaattgcagccaattgcgataaaaagccgaatgataaagatatggctgctttgaagaatacatttttgggtgtagctgataaattaagacacccggagaagaatgataaaaattatcgtccgacgatcaatatttccgggaaagtagcagctttacgggaaggagaggatatgatccgtgtgatcaagaaggaggggttttttaaggaggttgtcgattcgtgtgcaataaaatctgatggaacttacgagttgaaaatgcgtgtagcgactccgggtgtgtatatattggaatgtcaaggaggccaaagagtggaattttgggctgggacggaggatttgagtgttgattttcccggttttggtaatgcgaaatttaaagttgttcgtccttcttattacccgatccgtggaggaaaggataatgaggtgatgaacgctctgaactgggaagtttttcaaatgtatgaaatgttgacaaaggttcctgttcctattcgtgaatatatcagtttggctgatagtgtaaaaaggcaattggccgttgaggtcgctgatattgtgagtggggatttaccgaatcgtttacaatattgggctgagttgtatgctgatagggaggctgttatagcgatcttaaaagctctggagaaaaatgaatatgcggaaatggtaaaaaaaattgcagcaaatttgtcaaaattgtatccaacaagtacagctgtgaaagagtttcaagaggtgttaactcagaaagaattatcaggacaaggtcaggttgcaccggaatttgcttgtccgacacctgacgggaaaaagaatatgggaccacaagattttcgtggaaagattcttgtcatggacttttgggcatcttggtgtggtccttgtcgtgctgagattccccatttgaaagaggcctatgcgaagtatggcgataaaggagtagccttctttagcgtgtcaattgataagagcgatgccgcttggaaaaaagctttaggtgaagaaaatatgccttgggaacaggtgtgtgccccgcaggcagggaaagatgtgatgagattgtaccaattctcagggatcccttatgttctagttctggataaagaggggcgcattgttggaacgaatttgagaggtcaggcattaatggataagttggaagaattggtaaatgggagtaaacccaaagcagctaaatcatctatgatgatggtgagatagtattaaaaccgggagatgctatatgagattttaatgcttctttttatccacagtttatgcatggcttccggttttaaagataattacaaggagtgcgttgagataattttgacgtactccttttgtttataaaggaatattgatgattagagaattttaataaatatattcatttgtcgaaatagttattcgacttcttacctctaaacgtcacttttgaacattttgtttttacaatttcagcataaaatgtttattaaaaaaggcaggcttgctatttgttgatagtgtatcgtggtgataaacagatgtatggtgataagaaagtattcgtattgtacgatagtatattctttctccggaaaatctgaagattttgattgtacgatttattatgtatttttgtatgtagatcagatggccaataatgggtcaatggaattggaaaaaacagattgagtgtaatatgcggaatatcgtggcagatataagggagggagataagaactcgtttaaggagttctttggagattattatcctatcctatgtgtatttgcctcaaagtatgtgaagaacgaggagcaatgcaaggatatcgcgcaggagacgctattgagttattgggagaaacgggctgatttcgaggatatatataaagtaaagggatttctttatatggtggcacgtaaccggtgtttgaattacttgaaacgagagcaagtaaatcaggcatacgtggacgaggcgaaccgggaatcagaagaatattttcaagaagaggttatcgagcaagaaacttatatgttggtccggaaagccattgaggggttgcctcctcagatgagaaccatcatcaagtatgccatggaaggattgaaaaacccacagattgccagtgagatggggattgccgaggggacagttcatgctttgaaaaaaacagcttatcgtaaattgcgggaacagttaaaagagcatttttatctcctattttttgtctaatttccaaagtaatactagttttagaaaagtccatcaaagaacgataatttacgatagtctatgacgaattgatagtaaagttatagaataaatggtattacatatatt

SEQ ID NO: 471 - DNA, 3390 bp, Butyricimonas faecihominis
caatacatcaattcacgttaattcgtacccactgattcacactcgtaattctttcatttaattgatctactgaaaaaaatcgaacaatcatggtacctattgtatcattagcaccattaaaaacagagacccgatcccccttctgtatccacaaatcagtttcaacaacataacatgccacttctcgagatatttctaaacctacaaatatcccttctttatcggcatgcaatatcacttctacccaatactcattacaaggtcgttgctccacgtttaccacttcatcccccattgcagcccttacagtattacttatcaaatccactcccatggcatattgtaacatttcggccaaacgatttccccctcctcgcggagatacttccataatatatatttttccatttttaccgatacgggtttctacattataaatagaagtccgcatccccaaaagcttcaacaatcgttgtatttctgatgtcaactccttttcttgtgtttcagtaaaagttgacggccaactatatgctgaaggtgtataaggattagctgcttgatcatcaaaatgttgtgccgaaaaagaaacaaattttaattctccatctacagaaaaacaatccgaatcagaagaacacccctctttttcaataaattcctcaacaatcacccgtctggacatagaatgtaaaaacgcctcatgcaatgcatactccaattctgttgaaaaatcaacacgtgtaacccctttactccccgcagaatctgttggcttaacaataagaggataagtaaaaacatctgatttcaacaatgcatcttctatggaagaaaaaccaaatgcccaaggcacgctaaaactatgctcagacaaaaaagcacgaaacttatccttattctgcaaaatacacacggactcatacggtccacaagcaggcaatcccaattgttcctgtacgtatgcagcagtcataacaccagggtctaccgcaaatgacataattccatctatctgtaactccttcgctaacgtcaacacggcctctttatcaataatactcacattgtgatactcatctgcatattgatgagcgatattacttggaagataatcacacgtaatcacgtaatatcctagattatgtgctactttaataaccggaagtaaataccgtaatcctcccaacaataataattttttccgtctaccgatattattcattacaatacaatcaaacttagtattctatctatttcttccacccctaattcatgatgtatcggcaaacaaataacactatctgcaatcttacatgctacagacaaattctctagtctggcagattctaatcctcgataagtggaaaattcacttatcaacgggtaaaaataacgtcgccctaaaaccccgtgttctttcattttgaaataaagttcatcccgtgtcatcccgtatttttctgcattcacaaaaacaggaaaataagagtaattatgccgaacacccggcatatcttccataaaactgattcctggaacatcccgcaaaacttcacgatagcaaactgcaaccttgcgacgagcttctatagccttgtccacttgtttcaaattcaacagaccataagcggaacgcacctcatccatttttccgttgataccaggagccacaatcgttgtttctcctgcaaaaccaaaatttttcaaataatcaattcgctgtttagtcttttcatcacaacaaactaaagcaccaccttccaccgtgttgaatacttttgtggcatgaaaacttaacgtagacatatcaccaacttctaacacggacctaccatctacctccactccaaaagcatgcgccgcatcataaatcaccttcaaaccatatttgtctgcaatctcctgaatgcgtttcacatcacaaggcttcccatatacatgtacgggcataatcgctgtcgtctttggtgtaatagcagactcaatcttatctacgtcaatattgcatgtatccgaatcgatatcgacaaacacaggtttgattccattccaccacaaagaatgtgttgtcgccacgaaactatatggtgtcgtaatcacctcccctgtaatacgcaaagcttgcaaagcacatattaagggaagcgtaccattcgtaaacaagctgatatacggcactttcaggtactcacacaaagctttctccaactcctgatggtaatacccgttatttgtaatccatttacgttcccaaatatcctgcagataaggcaggaaatcatccaaagaaggcaacaaaggtgccgtcactgttatttgcttttgaatatccataattaattacgtctaataatggccattaattctttcatctctgagaatctcaataaccaagcagtcacactatagaaaagaatgccaaatcctataccagctaacaactggaaaagaatatttgtaaaaaaggtaactatataataaactccgcctcccataataaaagtcaacaacaaaataggcgacaaatccaatatctgtcgaacaaacccaacatttatcaattttcctgtataataagtattaattaccaaagaaattagcgaagatgctatttgccctacacacattgtcattaatcccattggtaatgtaataactagtattacaattccgattattttttttataacctccaaacgtaaaaacaactccgatcgcccttttacttgtaacaaattcaaattaatcgcatgtacaggataaaacatcatgaatagacatataactttcaataaatctgcagtaaacaaccattgttcccttagcaaaagaagaactaaaggtgtcgatattgcagcaagaccaatcataatagggaaaataataaaagcaacaattcgcaataatttcctataactttgagctaaacgttcattgtcattctgtaaatgacacaatacgggataagtcactctctgaaagactcctgtcaaagccgaagctggaaagtcagcaaattgttgagcccttgtataataacccaaatcagctttaggaaaagccttaccaattacaatcaagtaaatattactccataaagtactcaacaaacctgaaagcatcaattttgaaccaaaaccaaacaattctcgaaacgatttcatagaaaaacatttagatggacgccaacgtgacacgaaccacaaaacaattgcattaacgcctatattactaagctgttgtactataatagaccacacaccacacccactatatgccatacttatacctataacaccagatataatagatgcaataacagtagcttttgcttgagttttaaaatcaatattaatagttaaaattgcccgttgcacaactgtgaac

SEQ ID NO: 472 - DNA, 3381 bp, Butyricimonas faecihominis
aaatatagctatgcggctatatttttgattattattttcaaccgaacgttaatttaaacgatcgtggccatgaagcataaatcgtaaatcctatcttattttctcttgtcattccgccaacaaatctttagctttgtacaaaacaaaacatcatggaaaaaatagacttgaacaaaatatacaagcggaaaaagagcgaccgcgacatatttcaggaactcatgcccttcaaggtaaaagaaatcctgctcatcgccaactactacgactcctacaccatcgaacgggaaggacaattctccgggaagatattcggtgaatatctccaactgaaccttttcgcagctccccgtttcacctccgtggcaaacgaggaaggagccttgcacgagctgaaaaaacgccatttcgacttgatcatcatcatggcaggattggacaaagaaacccctatcctcaccagccgtcacatcaaagaactctaccccgacatctgccaactcatgctggtcaacaataacgcggacctctcttacctgctgagttctgaaaaagagatcagcgaatccatcgagcgggtattcgtgtggaacggttccacgaaagtgtttctcgccatggccaaatacttggaggacaagattaacctagaagccgataccaagctgggcgacgtgcgggtgatcctcgtcgtcgaggactctgtaaagtattattcccgctacctgcccctactctacaccgagatcatgagccagacgcaggccatcatagccgaggaaccctccaacgacgagatgggcgtgatcctccggatgcgggtgcgcccgaaactgatccttgtcagtaacttcgaggatgccgtgggcatcatcaacaaatatcgcaacaacattatcggtgtcatctccgacgtccgctacgcccacaacggcgtggaagacgaagacgccggggtcagtctcataaaatacgtgcagcaacttgacaacaagattccttgcctactccaaagccacgaggccaacaacgagcgccgggcacgggaagtgaacgcccatttcatcaacaaaaactctctcacgctggcacgggaaatacaggacttcatcaaaaaccaactcggttttggagatttcatcttccgggaccacaatggaaaggccatcgaccgggcacacaatatcgaggaattccgccagaaactcatgaccatccccgacgaatcactggaataccatgctattcgcaacgggatctccacgtggctcatggcacgggccgaaatcaatctagcgaaaaaactacgccgttacagtttcagttacttcaaaagcccggacgaaatacgccgtttcatagcgaacgtcttcgaggcatcgaaactcaagaaactacggggacgcatcatcaagttcaacccgaaactcgtgaactccaatcgctacatcaccctgctcggcgacggatcgctcggtggcaaggggcgaggattggcgttcctctccaacttcatcgagaatgtttacctcaagaaactcatccccgacctacgcgtggctatccccaagacagccgttatcggcgtggatgaattcgacaacttcctagagaccaacaacctctacgacgtcatctttgaggacaaagaatatgatcacgttctggaggccttccgcaccgcacgcctctccgagaagttacgtgacaacctgcggaagtaccttcaggtcatgactaaaccgctagcagtgcgttcctccgggcttttcgaggactcgctcaatcaaccgtttgccggggtctattccacctacttgctccccaacaaccacccggacttcgagcgtcggctggaggatgttgagaacgccatcaagctcgtcttcgcctccatctactcgccggaatcccgggcatacttcaacgccatcgactacatgatcgaggaagagaaaatggccgtcatcatacaggaagtcatcggtaacgaacataacggacgatactaccccgaaatcagtggtgtcgcccagtcctacaacttttaccccttctcctatatccagccggaagacgggttcgccgtcactgccatcgggttgggagcctacgtcgtgggtggtgaaaagacgcatcgtttcagtcccgcctatcccaagttgcaactggcctccacgcaggacaaaatcaaggcatcgcaacgttacttctatggagtgaatatgcttgcgcaggattacgacctctaccgggacggggaaaatgctgctatcaaagcgtatgacatctcggaggccgagcgtgacggtacgctggaatacaccgcctccgtctacgacttcatgaacgaccagattacttacgacttttccgtcaaaggaccccgcatcgtggatttctccaaaatactccagtacgactatttcccgttggcacctaccctgcaaatcctactgaacattttctcgcaggccatgggttcccccgtcgagatcgaattctccgttaacttcgagagcggcacccccatcttctacctcttgcagatcaaaccgctaatcaaaaacgagtataacatcgacatcgacgacctgtccatcgacccgacacacgtgctgttaaaggctgataaaggaatggggaacggaaaattgcaatatatccgggatgtcgtgtacgtcgatcccgacaaatttgaccgattacgcaccgaagaaatcgccgaggaaatcaaacgtcataactcgcagatcgcccgggaaggcgataagtacttgctcatcggaccgggacgctggggtacacgcgacccgctcaccgggatacccgtgcaatggtcagacatcgccaatgccaaagtcatcgtggagcaaggacttcccgacttcccgctggatgcctccctcggctcgcacttcttccataacgtcacctccatgaaagtgggttacttcgctatccccttccagtccgcagatgccttcatcaactttgacatcctccggcaacaggacgttatcgaggagtttaaatactcccgccacgtgcgcttcaaggccccgctgaccgtgtggatggacgggaagaaacagacgtcggtggttacgtattagtcataaaggggctgtccaagaagtcaattttaaacaactacccccactaactcccccttacacaggggggagaaaccgtttggtaatcagctctccccctgtgtaagggggagccggagggggtagttgacaataccatacaagacttttgacacaccccaaagcgccccgctagaggtccacgggctttatagacctgataactccctttccaaagcccttcccagaaataaaacaatccaaaatggcagtaaattctatatat

SEQ ID NO: 473 - DNA, 3364 bp, Butyricimonas faecihominis
aaattaagggtctttcccttgtttttgtgattttttggagatcatgagaacaggggaaaaattatgttgttttttttcgggtttaggggggatttatagcaagaaattgtatttttgcaaatcaatggataatacggtattaaaagtttgagagatatgacgatagaaaaaatgcttactcagcaggtgctggaggccgtaaaggcttgttatggggttgaattaaccgagaaagacgtacagttgcaggaaacccggaaagaatttgccggtgatttgacggtggtcgttttcccgtttacccgatattccagaaaatcgcccgaggaaacggctaaagagctgggagagtatttgaaacaaaatattgaagaggtggaaacctacaacgtgatcaagggatttttgaacgtggtgatttcttctgcttactggatcgaggtgttgaatgacgtggcaaaagaggagaagtacggttatgcgaaggagcctagcgggaagacctatatgattgagtactcttcaccgaacacgaataaacccttgcatttgggacatatccggaataattttctgggatggtcggtttctgagattcagaaggcaaatgggcataacgtgattatggtgaacttggtgaatgaccgggggatccatatctgtaaaagtatgatcgcgtgggagaagtttgccaacggtgctactccggagagtacgggaactaagggggatcacttcgtgggagattattacgtgcgttttgacaaggagtacaaggcgcagatcaaggagttgatggagcagggcaagacggaagaggaggcaaagaaagaggccccgatattgttggaggctcaggagatgttacgtaagtgggaagccggggacgagaaggtggtttccttgtggcggaccatgaacgattgggtattgaaaggttttgacgagacctataaaatgatgggtatctcgtttgacaaagtatatttcgagtcacagacatacaagaaagggcgtgacctcgtgttgaaaggtttggctgatggcgtactttaccggaaagataccggaagcgtgtgggccgatcttaccggtgatgggttggatcacaagttgttgttgcgggatgacgggacttctgtttacatgacgcaggacattggtacggcatacgatcgtttcaacgagtttaatatggatcaggagatatacgtggtgggtaacgagcagaattaccattttcaggtgttgtcattggtttgtaagaagttgggattcgattgggccgacaagatcaagcatctttcttacggtatggttgaattaccggaggggaaaatgaaatcccgtgaggggacggtggtggatgccgatgatttgattgacgagatgattcacacggctcgtacgacttccgaggagttggggaaactggacggttacacgaaagaagaggccgaggacgtgtatcgtaaggttgctttgggggcgctgaagtattttatcttgaaggttgatccgaagaagaccatgatgtttaacccgaaggaatctattgattttaacgggaacacgggtccatttatccagtacacctatacgcgtattaagtctgttttgcgtaaagcggaagaggccggggtaaagatcgttccgggagatattcacacggcattaaccgagaaggaacagaatttggttaagctgattgctaaattgcccgcggtcgtgaaggaggcaggggataattatagcccggcgttgatcgggaattatgcttacgagctggcgaaggaatttaaccagttctatcatgattactctatactgaaggaagaaaacgagcaagtgcgtaatttacgtttgctactggcacggcaatgtagcgtggcaatagagaatgccatggggatgttgggaatagagatgccggagagaatgtaagaagatcgcctgcggcgagttgcaggtttacaggttacaagttggtgttaaattgaataaagatgagaaagattgaagctaagaatatagacaagaacgtgatcaagttgatcggtcaggattggatgctggtgacggctggggatcaggagaagttcaacatgatgacggctagttggggatcgatggggtatttgtggaataaacccgtggtgatggtgtttgtgcgaccacaacgttacacgttcgagtttacggagaaaaaagatgagtttaccttgtcgttttttgacgagaagtaccgtcatgcattgaatgtatgtggttctgtttccgggcgtaacgtgaacaaggtgcaggaaagcgggttgacgccctatttcacggaggccgggaacccggctttcgaggaggcaacattggtgttggagtgtaagaaattatatactgacttcttgaaggaagaggcttttctggacaagaagatcgtggatagccagtacggccagaaggatttccacaaagtgtacgtggccgaaattgttcatgcttgggtgaaggagtagctgatggatttatgcacgtatcatagtcattgtaatttttgtgacgggaaagccccggcggaggatttcgtgaaggctgccatcgaggcgggatttcatagttacgggatctcttcgcactcaccacttcctttcgagacccgttggtctttaagcaaaggaaacgtggaggcttacctgacggagataaagcgtttgcaggagaaatacgcggggcagattgagctttatgtggggatggaaattgattatctgaatgatgattggggaccggcagtagaatattttcagcgtatgccgctggattaccgcattggttccgtgcatctcgtgaccgaggaacagacgggtgagatcatggatatggacgggaagttcgaggattttagggagaacttgcgtttggtctttcatgatgatctgagatatctcgtggaggcttatttcaaggcgtcttcccggatggtggagttgggtggttttgatttcgtggcgcatttggataaaatatccatgaacggttcactgatggatagcacgttgacggaacaggagtggtataaccggttgttgtgggactatatgtccttgatagcggagaagggcgtcatggtggaggtgaacacgaaagcatacacgaaaaaggggatgatgttccccaatgtgaagtatttcaagtggttgaaagagttgaatattcccgtgatggtgaattctgacgctcatttgccccagttggttaatgacaaccgggcgttggcattcgagtggttgcgggaagtcggaataaaaagcacgatgcgcttgcatcaaggtgcgtgggtggaagtaccaatagataataagtagtataa

SEQ ID NO: 474 - DNA, 3320 bp, Butyricimonas faecihominis
tatatatattgttattaggaattgtgaccggcttgacggcttgttccgattggctggatgtacaacccaaaacatctatcccgggtgatgacctgttcgagagtgaggcggggttcaaggatgtattgaccggtttttatctgaaaatgggacaaacaagtttgtatgccgaaaatttaacttacggttatctggaagtgatgtcggggaattatgattattatcccgatgtggtattgaaggatatatacgattatgataatacatggttatccgagaaggataatatttacgggtcgatgtataatataattgctaatattaataattttttgaagtatatcgacaagaatcgttctgtgattaaaacggggaaatattacgagttgatgaaaggagaagccttgggattgcgagcttttttgcattttgatttattgagactcttcggtcccgtgtatagcgagaatccgacggggaaggctatcccttacagggtatcgtttgatctgaaagcaactcctgtgttaccggccgatcaggttataacgtatgtgttgaaggatttgcacgaggctgattctttgctggaagtttcagatagcaagagttttaagattcccaacacgtatgataaggattacaatgctttcgagagttcacgccagttacggatgaatgtctatgccgtgagggccatgttggcacgggtatatctgtataaaggggatgcagacagcaaggctaaggcgttgacttacgcccgcgaggtggtggaaagcgattatttcggtttgcatgaagataattccaatccggtattgtttggtgagcatattttcggcttgaatgtttacgagttggacaagttgttggaagaggatggtaaatataagacgcaaatccccgaggggcaactatccgaggcgtattatatcttgcggacaaaagagaattttgatgaacaatatgaaaccggaagcaggggatccttcgatattcgggcaaatacagccgcttttaagaatgtgtccggggatggagataaaaggtataaactttgtttgaaatatgatcagtctaagtatacttccaattcttctcagtatagtgggaaaaatgtgttgcccttgatccgcctgcctgaaatgtattatatcatagcggaatgcgagacggataaggaaaagagcgcggaggcgttgaatacggtaatgtgggcaaggggaatttcctatgaggatggggtggtcgcggatgacgcatacgatcggttggatacgagacccgattacgatcaggcccacacgaaacgagttaatgaacttatgaaggaataccggaaagaattcttttctgaaggacagttattctacttctataaacgtcataattataggacatttccttattgtgtcaaggaaaatatggcaggtttctaccaatggccgttaccggacaacgaaataatttttggcaataacaattaaattcgacaaagatgaaaaaatatagatttcttttattgctatttgtattgggtttcatttacatgggatgcgaggagaatgatattgacgtgtacgatgagacgcctcgtctgaatctgtattatagaaatttagccgttcatttcagggattccgattacgtgaaaggaaatacggagaaagagtggttgttgagagtggatttgcaggggtatcgtctcacggaggataaaagtttttgtatgaaagtaaggccgaatgacgcctatacgttgaaagcggatgtctcttttgccgagcagtacatgtttccaaaagattctatacaccagatctttacgataaaggtcgctcggccggaaaatttgacaacaacgaaagcttaccaggcagacatctgttttgatctggacaatcctttgcatcagtttgatccggggcgggaagacaaggaggttttaccgttagaggttcattacgtgatcaagagaacgaattggaatgactatcaatggggtgagtattccgatgcgaaatacttttttatgatggatcattttaaggccacgatagatgatatcccggcgaatgaggatactcaaaaagagatatatgatgcttatgaggaatataaaaagaataatccgcctttgttggacgacaagggaaaggagatcgtatttaaaaaagtagactaaaaatgattgccatgaaacgatttataaatatagcagtttttttcctgacaggcggacttttattgtccggttgttatgatgacaaaggttcgtatgactatcatgatgttaatgaggtggttattgatttgcccacgaccgtgagcgtgcggttggataaaaaagaggctgtctctgtaaagattgaacccaagttgtctcagacgctggaggagggtgaggctcaattgacatatctgtgggagagagagaagaaaaatagtctggggttgaacgaatggactccttgcggggaggaaaaagtatgtgaattgtcgtttaatccggaagatgtgaaccctttggctatccgtttacgggtgcaggatcaccgggaagacgggagtgaatggtataagcaactgaccgtgcaaccgatcgttccctatagccgtagttggtttgtacttcagtataacgagggtaaatgtgtgttgggtgccgtggatggtgaaggaagtggcggagtggttattcccgatgcctacaagttggatatggggaaggatttgcctattggcggtacgccgaaatatttgttgacggattggatgtacggatccccacagggttccattattaatgcgcaacaaccggtgatatttgtcggaacggatcaggatgtgtatttgatgaatgctgtttcgtttaaacaggtatggaaatatcgtgatatgttgcatatcaaagaggttctgcatgatgaaaattttgtaccggagtggttggcaacccaaacttatagcacggtattaggggagatattatctgataacgggaagttgtacatggcgaatgctgacggttattctgtgtattatccgcttgtatgggaaaatgatgccgatgcctctgaattcaaaattacgaaggtcgcccccctacaaggtataggttttattctttatgatgagcaaaatcaccgatttttaaaaaccggaatttatgatgattttatggaagggtattattataatcagtactatagaaaatatggaatggaagattatttttacccgaataagacggtgaaaaaactcgcaaagatcggagaaaatccccgggttgaaaatgtgttcgatccggacaatat

SEQ ID NO: 475 - DNA, 3319 bp, Butyricimonas faecihominis
acgggaaaacggatatgcaataccacgttcttgtttgattgttgatatccggaataaattatccatattaaatgcaactgaaaaatgctgcattcccaaatattgttttatccaattctgagaaaaatcatattttacttgcgcactttggcattccaacgtattttctttctgtacaaaacgagaagtcatttgtgtcgcagtcttatctttcacgtccttgaaaaaggtatggtctcccggttctctccaacgatccttatataccctacgatcaacattatattttacatctgcattttcaacccgatcaattaatgtcgaattataagcatatccaccaaaacggtaagcaaacgaaagattcacgctaagatccttccaagtaaacatggtattgatatttccccggaatttgggatcctgcaccccacaggcctgtttatcacgagcatcccatacataagtcaattcgccaaaacgattcacatacaattctttacccgtactcgggtcgattcccaacgaaggaaccacatatagcgtacgtaatgcctccccttcccgataaaggaagttcggatttgaacctccagctgcttccaattcttcgttttctgccttcaaagcatccgaaatcttcacgatttcattcttttcatgaatcatgctagcagataaggaccaaattatatttttctccgtattccgaatcaagaatcccgatgctgacaattccaccccggtatttctcacttcaccaatatttgcggtataactagagaatccattcgctaacgggagatacatctctgacaacaaattatctgttgtatttcgataataatcagccgttactctcaaacggttattcaagaaagccaattcaagtcccacattccatttgtcagtttgctgccatgtcaaatcctcatttgccaatcccatcaattcactaccaaaccaataccgatagcgatcacccgtaaaatactcataactggctaatgcctgataagcactaaaatttacagctcccgtcacagcataggatgcacgtaattttaaacggtccaaccaagcaatcccttccataaatttctcttgattaatattccaacctaaaccaaaggaataaaaaggagcaaaccgtttatcactaccaaaatccgaagccccgtcaacacgataagaaatatcagcaaaataacgtttatcatagatgtagttcacgtttccagtaaccccaagacgcctttttacagattctgaccccgatggttttccatccttttcatactgtaaggccattgacaacattttcagatttgcctgtggaaatccttccatcgtgaaagtataagattttgattctgactgagctagattatagttcaacccggcatacaactcatgtttatcgccaaaagtttttgaataactcaacgttatatcccaatcataactaaatcctttatcagaagaatagatgtactttccttttctgaaaatctgatcatccgtgtaatctttaaaatcagaatgctccgccggtttgaaattatccccgttacttaatgttttggtcaatccgattcgtgaacgtaacgtcatatttttcaacggtctccactcaatagcaaagttatctgtaatcgttgttgtcgttgtttgatttaccaaatccaatgttgcatcgtacaagggattagccggtccaggattgaacaaatcgtttgtctcttccaattcttttacaactttcccgttttcgtctacccccgtccagtaaggatttaatttcacgtattggtcaaatgaaccataagaagattcattggattcacttaatcctacctccagactatttcggaataataaagatcccaattcataaaccaaatctacattcccgttgaaagtttcacggttagagcctttcattacacccttaacatcattatactgtacagatgcggaataacggaaaccaccttccccacctccttctaaacgaagattgtgtttgtgaccaactcctgtacgcaaaggcttggataaccagtaggtatcaaccccgctctccacggcctctttcactttcgtataacgttcttgtaaacgcatcgtctcgttagaaaaatttccttcataaagtcctgcatctacctccaattgtaatttttcccgtgcatccagcaaatcataatctgtcagatccgggatctccacgttcagacttccccgataagacaaacgcaattttccgacttctggacgcttagattcaatcacaacaaccccattggctccacgggaaccataaatagccgttgcggatccatcctttaataacgtcactgaactaatatcctcatcattcaaatccagcattcgctgtaacgagatttcaaaaccatccaaaatgattaaaggtgtgttcaaactacttgtcttcgtttcgttttttaagtcttctacggtaggcaaacttgacgttccacgaatttgcacttccggtaaatgattcgggtccgacccatacgtattgtcctcaatgatattaaatgtcggatcaatattcttcagcgttgataacaaattacgtcctctaaatgattttagttctttttctgtaattgttgaaaccgcacccgtaaaactttcccgtgattttttaaaaataccagtcacgacaacatcttccaactcattctcagcaggttttaacacaactgtaagttttgccatctctttgttaccatcaaccataatttctttagattccattccaaccatggaaaactgcaacgtgtgtttccctgccggaattgaaaaggagaatttcccatcgatatctgtcgcggcaccaatagaagttccttttatcaacacggtcacacccggtaaaggctctcctttttcatcagtgaccaccccggacatcttcacggatttttgttgggattcattagctttccgctctcttaccacaattacaccccgacttacctcataactgaaacgtgttccttcaaaaattcgattcagcgcatcttccaccgtaactttttccaacttcatatccttacaaggaacatctctcagtacattttcattataaaggatatttacccctgtctgatctttgatcttcatcaacacgccacttagcgtctccgacctgatgtccaaagaaaccattttgccttgcgcacttaccgaggttggaactaaaacaaccagcccaaccatcaggatataagctaaacgcataactaagaatttttttctccaacaaagggacgatgtataatca

SEQ ID NO: 476 - DNA, 3319 bp, Butyricimonas faecihominis
gggaaatcggcgagtaagcgaggacagacagagagtttactcgttgtctgtcgagcgagagccgattcgagaccggcttccgggctcaataccccgaaggggggagggagtttgaaaaatgacttttgacacccccctttcatataataaaaccttccatcaaacaaacagattcacgtttgcatcctccgcccgctccagataagtcgccacaccaccaacattcaccccatcaatcaactcctctttcgtgatccccatcacgtccatggacatctggcaggcaatgaactcaaccccattgttccgggcctgttcaatcaaactctccaacgaatcgatttgcttattacgcatcaccttccgcatcattcgggttcccatccccatcatattcatcttcgataaagacaacttacgacttccggcaggcatcatcatcccgaacatcttgctcatcgtgtctttcttcacaacatcggtacgctctttccggatcacgttcaacccccagaaggtgaaaaacatcgttaccttccgtcccgtcgatgccgccccgttcgcgataacgaacgacgccaacgccttatccagatcatcactgaacacgatcagcgtcttgttgttccccgccccttccttcaccacgggacaaactcctgcccctttctccaacacagccgtaattatacccttttcttccttcacatccaccaactggtttcccgtcatcttcgcccatgatgccacatcccgggaaaacccttgatcggtcactttaatctccaaacgttccccaaccttcaattgctccatcccacccttcaacttcatcacgggtcccggacattgtaagccgcaagcatctatcgtgagggatttcttctccaccactttctccggagctttcacttccatcggctttttcggttccggttccgaatattttatcgggttacattgttccgccatcgccgttgaatacgtcttgtaacctccattcaggttcaccacatcataaccgtgttgcatcaatacccgggctgcaatatacccccgcaacccgatggcacagaacaccacgattgtccgatctttcggtaatttttggtattctccccgtgaaccatccaaggaaatattcacggctccctcgatacttcccatcgcaaactcctcggccgtacgcacgtctaccagcatcactttggatcggtccatatctttcaattcccgccaactaatcatcttcacttttccactcaacatattatccgccacaaaacctgccatattcaccggatcctttgcagacgagtaaggtggcgcgtatgcttgttccaactccatcagatcataaatagtcccaccattccgaatcacggctgacatcatttccaaccgtttatccaccccatcaatacccacagcttgggcgcccagcaacttcccatcttccggtgagaaattaatctttatatccatcataatcgcccccggataatacccggcatgagatgctccatgcacgatggcctctttataaggaatttgcagacgatccaacatctttgcagacaacccggttgcccccacggtcaagtcgaaaactttggcaatggccgtactgatagaacctttatatttttgatgattaccattcaccacgttatctgcacagatacgtccctgtttattggctggtcccgctaaaaacgccagcgctggacgaccactcaccgggttcgggaactcgatggcatcacccacggcataaatatccggctgggaagtctgtaaaaactcattcaccttaattcctcccatctccccgatctctacccccgcctcacgtgccaatttcacatccgggcgcaccccaatagaaagcacaaccatatcaacctgcaacaccaacccgcttttcaacaccacgtcaataccgtcctccacggagcggaacgctgtcaccgcctcctgcaaatgcagcccgacacctttcgacttaaaatgctgatgtactgcagtagcaatctcgtaatccaccggagtcatcacctgatcagccatttccacgaccgacacttgaatcccatattcatgtaggttctccgccatctccaacccaataaatccggcccccacgatcaacgcccgtttcacgtcatgctcctcgatatactccttcacccgatccgtatcattcacgttacgtaaggtaaaaattccttccgtatcaatcccctctaacggtggacgaaccggagccgctcccggcgacaagatcaatttatcatacgtctcttcataaagtcctcccgaatccaaattatggaccgtgattgttttcttttccggatttacacgctccacctccgaacgcacccgagcctcaatattaaatcgtgcggcaaaactttccggtgtttgcacgaaaagtttctcccgttcgtaaatcacctctccgatataataaggtaaaccgcaattggcataagagatataatcacctctctcgaacataataatttcagcactctcatcgagcctacgcaaacgggctgccgttgaggcaccacccgccacaccaccaacaatcagatatttcatacacgcttagattttagggttatatatatttttcaattatttcctgtaactgtgatgcttgaactaccccgctattattccacaacacctttccctgtttaaataacatcaacgtgggtaccgactggatatgatacaaatacaccggttgtcggttagctggcacatccacgtcaatcttcaagatgattaccttatcacccagcctctttttcacctcctccaaaatcggatgcatcatcttacacggcccgcaccacgtggcaaaaaagtccaccaataccggcttttctccattaatcaactcattgaatttatccataatatcacgttttaatttatattacttataacgtccgttctcccgtaaagttcacggacttacttcgtgcatttcatcatgcaccgcatggcctccgtgacatgatcactcgccatactataaaaagcattacgtccctcccgccgaatcaacaggattccctttgcttgcatatctgtcagatgatgcgaaatcaacgcctgactacatcccatccggtcacatatatccgacacactcatctcaccgtttttcgagagcaagcatataattttcaatcgattcgggtgtgccaccgctttcaacacgtaagctaacttttccaattcttcttgtgtaaaacattctgtttccatattctccttttttgaatacacaaatatataa

SEQ ID NO: 477 - DNA, 3303 bp, Butyricimonas faecihominis
atataattaagtaccaaaaacaaaatatttcctaacatacaaatttatagcacaacaacaactaccccgtaaccaactacaaaacccaacaaatctaaccgagaacaagaagagatctaaccgaaaagctacccctctttcgaaaactccccagagcttaaacagaactcagataacagcgacaggcgaatcaacggtttatctctgaatgatcaacgaaaaagggtactgttctctattagattacaactgcattacacctaattctggtttaatcaaaccgatatttcattctcttcgggaagacattttaagacatgacaaacgagaaaggtaataactggctggccttgatcaaaagggttctttttttgcctatcatgataacatcaaaatccgctttataacgttgaacaatttctgccatcacttgccgacaggccccgcacggagtaacattttcatccacttccacaccatgatcacgggctgcaatagcgattgccttaatccccatctccggataagcggaacaagcataaaacaatgcggtccgctcagcgcacaacccggaaggataagcaacattctcctgattagtaccacaaacgacctctccgttattcatcagcacggcggctcccacggcaaaaccggaatacacgcaatacgcatttttcgtgacatccaaggcagcacgacacaattcctcgtacccttccgggtaagattcccggtacaccgtgtaatcaatcttcaattccgctttctccattctattttttttcgtaattttaccgccaatataaaacattatcggaaactatgagcaagatttacgttattttatttttgagttttatatgtgttaacatatgtggagcctctacggacagtcgcaaagcgttcatcaaaaaatataaaagtatcgccatcgaagagatggatcgtacgggaatccccgccagcatcaagctggcacaaggaatgttggaatccggatgcggaacatccaaactggcggtcaatgccaacaaccatttcggtatcaaatgccacaactggaacggggccagtttcaccatggacgatgataaacgaaacgaatgtttccgaaaatacaggaatccggaagaatcatgggtagatcacagtgaattcttgctcacccgtccccgctatgcctttctgttcgacctgccaaaaacagattacaaaagctgggctaaaggattgaaaaaagcaggatatgcaaccgcctccgattacgcacaaaaactcattaagattatcgaggaagaagagttatatcaattcgatcgtccggcaaaaaaagtccgtccgatacccaatgaattaaactacaaactcagcgaaagcaaaaactaccagagccgggtggtatatatcaatcggattccttctgtaaaagtgaaagaaggggacacgtttgaaagtatcgcccagtatttcaatattccgttgaagaaattattaaaatacaacgataaaaacgaactttcgatccgtacaggaatgcacgtgttcttggcaaagaaaaagaataaagctcccaaaggttacacgttccataaaacgaaagccggagacaccatgtacatgatctcccagatatatggaatcaagctcgccaaattgttgcaatataactacatggaaaacggcgaaaaacctcaggttggagaaatgatctcgttaagaggtcccgcccaattatactaaaggagaaaaattaaatggaaaaaaataacgagctattcttaaagcagaattcaatattcgggtgcctgatcgggggtaccttcattttcgcatctttgttatttatcctggcaggaaaaggaatcgtggtaaacgcacaattccacaacatcatcatgatgctaaccattttcgggatattcatcggtgttcggaaatacagggatgaacagttggctggtgtcatttcctacgggaaagcactgaaaacaggcatattcatcctttgcatcgcctcgttatgctatgccgtgtacgtgttctttttatacacgttcaacgcagacttactgaccgaattcaaaaacgtgacaataaacacactgaaaattaccggccagaattccccactcttcaaaatgctcgaagaaaacgttgatgtatattttgttcccgccagtatcgctttcggggaattattcaatagaatcatcgtgggaacggccttctcgctatttatagccgggttggtcagaagaagtaaattaccgtttaacccgcaagaattttaaacatggatatttcagtagtcgtaccgttatataacgaagaggaatcgttaccggaactttccgcatggattgaaaaagtcatgacaacgaacaattttacctacgaaattatcatggtagatgacgggagtaacgacaagtcatggaaagtgatcgaacaactgtctgctaaagacaatcatgtacgcggcattaaattccgccgtaattacgggaaatcagccgcattacattgtggtttcgaggatgcacaaggagacgtggtaatcaccatggatgcagacttgcaggatagcccggatgagattcctgaactctaccgcatgatcacggaagaagattatgacttgatttccggctggaaaaagaaaagatatgacccgataaccaaaacactcccgacaaagctcttcaacgctactgcccggaagttctccggcatcaagttacatgattttaattgcgggttaaaggcttataaaaacacggtagtgaagaatatcgaagtgtacggggagatgcaccgttacattccgattttggccaaacaggccggattcacccggatcggggaaaaggtggttcatcatcaagcccgaaaatacggggtaacgaaattcgggttgaaccgatttattaacggtttcctcgacctactttccgtaacttttattacccggttcgctaaaaaacccatgcacttattcggtgcgctgggaacgctgttatttattatcggattttgtgccgccgcttggattggtattgaaaaactgatcgccgtggcccataacctgagagtccctctggtaacaaacaatccttacttctatatcgctctgacctgcatgatcatcggttctcaacttttcttgtccggttttctggcagaattagtttcccgaagtgccagcgatcggaacgtgtacaggatcgagaaaaaaatataaatcacaaaatattctaaattaaaaatgtccacctcatttgaagtggacattttcaatat

SEQ ID NO: 478 - DNA, 3291 bp, Butyricimonas faecihominis
gttatagatattccagtaataatattccggggaatggggtaacgtccgttatcctgcccgccttcttcgggattcagtcctttgaagtcggtgaaataatgaagattatttcccgtcacgtgaacccggactccggcaagacctattttacgtaacagacgccttggtaattcatacgccaaggtcatttcccgcaagcaaaggaagtcacctttctccacgtaaatgttacaatttaccggaaggttataagcttgattccagatgtaacacggcatagatgcttgatcaccctgttgcttccaagagttcttggccatgtttttcgtcaagtttccatctccctgcgagttattatccataaaacgagtggcataattataaatcttatgtcctagtgtatagtcaaaacgaacagaaaaagttaatcctcgaaaactgaatgaattggtaaacccgccattccatgtcggatagaaattaccaagatacactttatctttcgaatcaatctgaccatttccatccacatcccggaatttggcataaccaccgtattttgtcttgtcgtttccgggaattaacgtgttcacgatcggatcgttttgggcctcttcgtcagtagcataaacaccttccaacacatgcccatagatgtcacctactcttcctccttcttgcaagccacccatccaagcatagtctttcttggaaggaacccacacatattctccaccaatacggttattctccgctccgttctccggcaaacgtaaaatcttatgtttggtgtgcgttgccgtcatggccacgttccattgtaaaccggaccatgccggaagaaccgctgcattcacctctaattcgatacctttattctccaaacgcccaagattcgtataaatacttgcaaacccggttgaaggaggtaaagaaagagaagtgatcaaattatcggtaactcgccgatagtaatcaaacaaaatacctatccgattgttgagtaaaccaatatcagcaccgatgtcaaaagttttagattgttcccatttcagatcagggttcgggatcaccgaattcaaaatggcagaagtgccgtcatatacatttcctaccgaatattcaccccgtgcttggaaatcggacaaaccgctgatatttcccgtgacaccgtaactagcacgtaatttcaaactcacgatgttttgtaaaggagtccaaaatttctcgttatgtacattccaaccaacggatattccggggaagaatccccatttgtgatcatcacccagattagatgccccatcataacgggcgctgagtgaaaccaagtaacgatctttataatcgtaatttacgcgagcaaagaatccggcaataacctgatcactttcatcaccttttacacttttagcaatagccgcagcattcaatgtcgggatcaaatcggtagcagctccacttcctttggcctcaagagttgatttttctctaccgaaataagaaaatcccgctttcacatccagattatgcgactcggcaaataatttctgataccccagaaccaaatccatctgtccttgcatcgttttgttataagatcccgtggcttctcgcgaatcgttgtaagtcatggaaccgttccagtaagccgggataaatgagtaaccgtcatacgtgtatttatacaaagataattgcggagtgaaagaaaatccgggcaaaatttcccaatcggcagcgatagaaagagacagattgtctttactatttttccgcacgtcatttttcaagtgatacacgggattcccgatactccgattttgtcccggggccaacgttccgtcctcgtatgtatatttggctgtcgggggtgttgtggctgaccgatagaaaatatctgccaagccgaatacttcattattggaagaagtcgtgtacatcactcgtccgaccacgttcaagttatcccgcaattttatactcccgttcaaactgaacgacaaacgcttgtacttggtggtaatcgcggttccttcgctatccatatacccaagtcccgcataaaaagtagatctttcatttcccccggaaaccgtcaagttatgcgaatgagaataagccgtttgataaatcagatcttgaaaatccgtatccttaaaaataatagtcttagatggatctatcgggtcaggcatactttcccaaccttcattcaacttatgtttgttttcttctgttagatattgagtggtgaaagaggtatttttagtcaaatcgttaccggtaccaaacccaagagccgaacctaaacgatccattgcattggcattataccgggatgcataaaccatacttttccgattcaactcgatatattcccttccactggccaaatcatatttcgctcccggttcggaaacagtcagtccataggaataagtagcttgcactttccccggcttcccggttttcgtggtcacgatgacaactccgttagaagctcttgcaccataaattgccgtagatgcggcatcttttagcacttgcagggattcaatgtcgttactattaatatctgccaaatcggtacgaatgatcccgtctacaatgtaaatcggggctgccccgttcatgttattaatagaggttccgcctcgaacaatgattcgcggagccgcaccgggttgaccggatgtactttgcacctgcaccccggatacatttccttgcagggcagtagcaacattagcataaggtacatttttcaaggcctcggccggcagtttcgtgatagatgatgtcactttctccctagcctgcgtaccaaaaccaactacgaccacttctttcactcgaattcgggaaggtttcatattaacattcaacaccttctgggctggagttagtttaaaatcccgaggttcgtacccgagaaaagagaattccaaagtgggttctttttctgtaaactctagcacgtaatccccgtcaacacccgtggtaaccccatgagtcgtaccttttatcaagaccagaaccccgatcatcggttcccgattttcatctagaacccgtccttttatgacacgtttctcttctttttcctttgttgcactatcttgtgcataggccgaaaacacaaaggtcaagcagagaaacacacataaaattttacttacaagcaaacttcctgttttttccataccaattattttatatttatcttttagtcattcaaactgcaagtcactattttacatatttctcaaagattataccatattaaat

SEQ ID NO: 479 - DNA, 3280 bp, Butyricimonas faecihominis
tgtaaatacaatgaaacgagtaaatttattcattcttttagttgctggaacattattattctttggttgtaaggataagacaaaaaacgaggcttctgggaatgcggaaacaaaatctacggtcacggtcggattgaggtcggctaatactgatacattgagagcgacgagtatagattcattacgtcatccctgtcggggatgtctggatacgattactgaaatcccgtatgatattccggcacagcgattcgatgaaacggcacaggctttggctcatgccacgggatgttttatcgagacggatttggcaaagacgggtagcgtgaaagtaaatgccgtgaaaggtaaaatgagtatccgggatgcgattcgcgtagcaattaaaggtacgaaactgcaaatcaccgaagaaaaaccggatcgtctgaaagtagagattgttgaagaataggcgttgcaaaaatcatcagctccttgttggggttctccggggagctgatgaagtcaatcaaaattatcttttaccatttgttctccgaatagccggactcgtacttcccggatacggtggtcatattgttcgtgggggagtcctccttttatagccatctgcttcatggctgagtattgctttatttctatttcacctaagcgataatcctgtaagctatatccttcgtttgtagctctttggacaaacatttcatgggctctttcgagacaggcgatagcctcggtacattgttgcttgatggggaaattatctttttccaaggtttcgatctctaccaatagatcgtgcatccgttgtttgttttcttcttctgtcatggtgtgatatttaattattcctcagaaaacggtgtaaacgctcttggtaagaacgcttgtatatttgctttcccgtttctatacttttgatgatccgcggactcaaaccggtatcatctgtcaaatcctgttgggtcaaaccaagcaaagtacgacggttctttaataagttgatagaaatccatagtgcaatatatttcccttttagtgcaaatttgcgataaaaatgggataattcaaccgttttggacagtcccaatttatatcctaatctaacccagataaagtggtaatctaaccgagattatctcacttaagcagagcttattcgaagctttcacagaacttaaatattgtggaatgtgggagctacgtgtaagcttcgagggttcttcgaataagtgggattatttgggtaacttctccttaggttctctttaggttctccttgtactcctgcttggaattagagtttttaccccgtaataacatcgtgataatactgtaataatctcacgtgactattataccgtcctttcagtactctttccggtatattgggaatgggttatgaaagggcgatgaaagggcaatgaaaggggcgggggagattataacgatagtaaaagggtggcttatccctgttttatccctgttgatgttttctaataataaaaacggatgaatcattgatttttgttcactaattagttatctttgtaaaagcaaaaatacttgttatggcagaaaaaagagaatatgttcgccaagtagtagcgtatgcaaattattttaaggatttcaaaaagactttatctcggaatactttgcgtaaaatctaccagatttttatttatataatgacgttagagcaggtcccggagatatttcttaaggcagttgttggggtgcatgggctttttgaagttagagttgaagagggtggtaatatttatcgaattttttgttgtatggacgagggtaatttggtgatattgtttaatggttttcagaagaaaacgcagaaagcacctctcagggagatagaacgagctaaacggattatgaatgaatattttgctagtaaagacaggaaaggagaataaaatgatgagtaatgatgaattgaaagcaataggatgtactccgattgaggatttaatcacggaagattttggtgctatcgggacggaagaacgtaatgaatttgaaaatggttgtgaggcattcattataggggagcaattaaaagcggagcgtttgaaagcgggcatgacgcaggagcaacttgcagctaaaataggaacaaaaaaaagttatatttcccgtatcgaaaatggacatgcagatattcagctttccacgttgtttaagatatttcaagggcttggacgtaaaattagttttactataatgtaatttcataaatcccttgttcccaaacgaggtgagtagtttattacttcaccatatgtttccgtaaaataagaatcgcctccccccggcgtttgttatagacggtttggagggcgaggcccaataagtatattatctggtccaagaaagtctatcaatgagcctctctttcacaactagatatgcctcttgggggttgaatgaaatctccggtcgcagtaataattgtgagtcaccaaggaaatctggatcttgtattttctcctccatgttgagaataaattgtttgtaggtgggtggctgttgtactgtaaacctcatatacttgtgatagcagcgaatcacgtcatctggatttacatccgtttgttttaatgcaacgtacagatcaaataaatcacgccctttctttcgttgatagagcgcacgtaatttcgtccccaataattcagcaaattggtaggtagtaatcttacaggaaccggaaaaccatttatttccgaccgagaaaggaacttctaccaggcccatttcagtgaaatgctcaaagcagtttatctccagtttcaaacgaatcggcatgacgggaggtatttcggattccatacgaaatagcatggtgttattatatcgtttctgttttgttactttatttggcataaaatcaagaacttcgcctagtcgggacatgatggattttatggggccggcagttatttgtaccagatcaatatcttcactatatcgaggctgaggggaaagatataatttatgaagagccgtacctccacggaaagccagttgatttcgcagaaagttatcgttaaaaatagccacgagacaacgtgaaatcagtaaatcctgttccacttgagcattgtccgtccaaggtacttgtgcgccccattcttgtatcgctgatctgtttatcatatatcgtctatttctattgtttgattaataataattttccatttgttgtttcgtttgtttccacggatgggcagacaatgtgcaagaggtgtatagc

SEQ ID NO: 480 - DNA, 3280 bp, Butyricimonas faecihominis
taatagaggtgaattatgaagtgtgtattagtgactggcggagctggttttttagggtcacatttatgtgatcgattaatagaatcaggtaattatgtgatttgtttagacaatttttttaccggttcgaaggaaaatattcaacatttggtaggtaatcctaattttgaattggaggaacgggatattatctggccttatatgaagggagtggatgagatttataatctggcttgtccggcatctccggtacactatcaatatgacccgataaaaactataaatacctctgtttttggtgcggtaaatatgttggaattggcgaaaggggttaaggcaaagttgttacaggggtctacgagtgaggtttatggtgatccagtgaaacatccgcaaactgaagaatactggggaaacgtgaatcctatcgggctgcgttcttgttatgatgaaggaaagagatgtgcggagacattgtgcatggattatcaccgtcaggccggggttgtggtgaaaattattcgtatatttaatacttacggacctcgtatggctcagaatgatgggcgcgtggtatcgaattttatcgtgaatgccttacaaggaaaagatattgagatttatggtgatggaacccagacacgaagttttcaatacgtggatgatttaatcgatggtatgattagaatgatggccacggaggataattttactggtccggtgaatcttggtaatcccggggaattcacgatgttggaactggcaaatttggtattggagttgacagggtcaaagtcccgaatcgtgtttggaacacttccggaagatgatcctaggaagcgcaggccggatataacgttagctagaatgaagttaagctggcagccgatgatccctttgcgggatgggttggtgaaaacgatagattattttaagtctcaattgtaattgttatcctcttttcgctttttcccaagttcctttacccttgtgttttttcagatagaaaagtgctttcaacacgtttaaattcatgaacatgaagtagtaagggataaatagaatctttatttttatctgttttttggccataatagccccgagacaagctagaacgtaaaagataatttgtaggatgattatgatcttgtagagggatgctccctgtgcaatgacgagaatcaaattcaacgggaatagtaggaataatagagcgggcgtaaccgaccagcgtagtacccggtgtgatatatattgaaaggagagggtgccatatttgaacaggttgagtagtccttttagccgagcgatagattgtaagccccctgctgcaatgcgtactttgcgtttttgttcttcgtgcatatccgcggagccggattcaatggcgtaggccttgtcgcaataggcaattttataaccttgcatggcaattcgtagcgagagaataaagtcatccagtaaagtgtcttcgggcatggggttgaataattccgtacggatggcgaataattcccctgcagctcctactgccgagtacaacttggaatcccacgcttttaattttgattcgtagcgccagtaaaaaccttctccacctgaaacagcgttgtctttgtccttgttttcgatacgtttctccccggccacgcaccccgttttaggattggtgaaacaagtcataatttcttttatcgatcccacgttgagcatcgtgttggcatctgtgaaaatcgtgtatgatgttttaataaatggcattgcccggttcagggctgccgtctttcctctgcgctcgggggaaaagagaaccgttacgttcgggtatgtggccaataacatatttgttgaatcggtggaaccgtcggtaacccagatcacgtgtaacttgtctttcgggtaatcgagagtcgcacagttatccatttttgctttgatgatcttttcttcgttgtaagctgcgataagtagcgtaacatcgggaagaggttccggaagtgttaatggctgttccgggtggagtttttctttgattttgacaaggatgtataataggattccgtatccgatgtatgtgtagaatacgataataatggaaatccagaataggtattgaagaaattgtgtcataattgttattttagatagaattcactgataaccgggttatgatcgctccatcctttttccggcgagtaatagtctgtacatttaaactctttagaataaaggataaagtcaatgcgtaacaggtggtgtattccccggaaggtataggcgtatccgttacctcgtgttttgaaactgtcctttaagtttcccttgatatgttgataagtgtaggatgaaggggtgtcattaaaatctccacagacgattgtgggaattcgtgtcgtgtcaataacttgtcttacaatttgagcctgcgtggctctgatcttgaaatttagggctaattcttgtgatatatccgttacgacgtcttctacttgttgtatgtctgcattttgtagtgcgggatcatctagtaatttccgtttcctgctgaaatttgttgtttgtaagtgacaactgattattcttgtcgttgtttccccggtttgaatatcaacccacatggcatcatttgtttgggaatcaagaggtatcttcccgaatcgcaaaatagggtatttactaaaaattcccgttcccaaggttgtggaaccgggtaagtaagttattgcatgatgggggcagtttaacaaatgggaaagagtgtctgcgttgatcttggtgttttcccggtattcttggaaacagataatgttagtctcgttattttttagaaattccgaaatatagtattgggtttccaaatgttcccatgatttgaattttcccacgttatagctggctatacgtaggggaagttttccatccggtaattcggaagatgatagtgtcatttgaaagattgacgtgatataaccgctatttaataaaatggcgatgataggtatgattacccaccatttttttctaatgatccagtaaacgagaattagtaaatttataatcagaacaacaggaatagctaacccgatgaacgtgataaatattgattcattggggtctgtctgtccggccatgtatgcgatgaggctaaatccagccgtaacgaaactaatcgggaccattaagagtgaaaagaaatatctgagagctgccatagaagtcttatcttgatgttgtttttaattttactttcattataatcgggttatggtcactccatgga

SEQ ID NO: 481 - DNA, 3273 bp, Butyricimonas faecihominis
aatcataacctaatgtaatagaattcaaactaagctcgttatccttctgcataaaacgagatgtcggttttgtgtacccatcttgatttctaatatccttatatttagcgttgtctcctggtttctgccatctttgtttcaaaacacgtttatccacattttcctcgtaaatcttagcattctcaaccttcgtcaccaaagtagaattataggcatcgccaccaaacttatacataaacgaagcgaacaatgacaaattcttataacgcacattaaatccgaaagacccctgagcatccggttccgtatcaccgataatcaccatctcgtctccagaccaagtataagtaatcgtcccatctttctttaaaaacatctctttaccatttgccggatcaattcctaaagatttcattccatatttggccgtattagaacctccttcttcatattttgttaaaatttccgaagacgatttcaaattcgaatttcgttggtaatactgatttacccggtcattataccgttttaatgcctccgaaatcgctaatatctcgtttttattatgagacatatttccatagacagagaaattccaatcctgacatcttacaatctcgtacttcacatccaactcaatacctttattcaaaacattacccatattatcataataatcattgaaaccagaggatgtcggaatagctaccgtggtaatcaaacctgtcgttttcttgtgataccaacttcccgtgataaacaaacggtcatgcataaaacctaattggaatccggcatcaaaagttttcgttttctcccaagataaagccggattacccaatgctttcagtaatgcaccaaatccggtacgataccattcctctgtcaacaccttgtaagttgtttttgccacataagggggaaaattcaccttacccgtagctccgtatgaagctcgtagcttcaatgttgacaacacaccttgttgtttcataaattcataattatgaatattaataccgagtccggctgaccagaaaggtgcaaattttttatccttaccaaaatctgaagaaccgtcaaaacgacaagaagcatccaataaataaatattattatacgtgtaattcaatccggccaaaaaaccaaccatacgactcaaacgttcattagcagtcggcttttcatatatttcctcggcataattaatagagttcaacgaacccgatgggaaacctttgtattgactggaactcccctcacttttatttgccttaatattcatcccggcagtcaaatttatattatgcccattcaccatttgattatatgcaaacaaaatattggtattccaactaagttcttcactcttacttaaattatacgagccagaagacatattatttacagacaatgattcattcttattttgtaaagactttggatcaacgaaacgttctgtcgtagaaaaacggcgggtcacactaaaatcaccctttaactgaaaatgctcagcaaacatccaattcacaccaaagttatcaattagctcttcatactttgatccactgaaattattcaacgttgactcgtacaatggatttacccgtcccaaatcctcagtcgtcatcccggatctattatgccattgaggcaaattttgggcaattaccccattttcatctttataacgatcataaggcaacgcagatgtataactagaaaaagagccatatggagaatcctctgaattcatcacgctataagagatataatttcgtactgacaatcctttaatctggtaattaatagaaaagcctcctcctactctctttcggaaagattctttcatcactcctttatcattccgataactaaaatcgattccatatcgaagtccttgagctcccccctcgatatacaaactatgctgtgtgttgaattcagtacgtaaaggttgcgacagccaataagtattcactccccgcactatattcgcctccttagctaacaattcctcccgcttagaatacaattcgggaaaagtctctgcctcataaaaacctgccgcaatttccgtatccaataattctctggcattcatcaaattataatcactcaaatcaggagtagaaacttttccggtcaaaccatatgttacagacaactgtccggctttcggagccacggttgtaatgaccaccaccccattggcagcacgagaaccgtaaatcgcagttgcagcagcatccttcaaaattgtaatgttttgaattctattaggatcaaaatcgtataacttctccacactaatttcgaagccatccataataaatgttggtagatttgaattatttttcaaattcgatttatccaacggatcggcatccaacgccttcactcccgtactggaagtaccccggatattcacctctggtaatgcattcgggtctgatccccatttattattctccctaattctaaaggaagggtcaaaaacctgtaatgcttgaatcacgtttgacttggaaactttcagtaattcctctttgctcacgctaacagcatttccggtaaagctctttttatcaatattggcatatccagtcacgaccacatcctccaaagcactcgtctcgatcttcatccgtatattcagcttcttgtctccttgtacttttatctcctgtgtttcataaccgataaaggaaacaagtaatatcaacgagtctttagcaggcagaagcaatgtaaaatctcccgtctcattagaggttataccgatcgtcgtacctttcaatataatcgtggcacccggcatgggctcacccctctcatcctttacatttcctttcaccacaatctccttcttttcttgaacaaccacctcttctttctcggaaataacatataccccatctacttccttgtacatatactttgtcccttgcaaacatttattcagaatctcaggaagagctttgttcgtcaatacgacattaatcctcacggatttatctatccgctcatgattgtataatatctttccacccgtttgtttgcttaaatgtcccaaggcatccaaaagagacatattttcaaacttaacactcatttgttgcgtttgggctgaaacctcttcccttagcatggtcccgtaagccagcaacagagtcacgaaaataaacaagaatttccgcaattgaatcacaacttttttcatcataagttattggttttaatttatatgattaaaaaacattagtatatagt

SEQ ID NO: 482 - DNA, 3267 bp, Butyricimonas faecihominis
ttattaaaggtttcggaataatttatttgttgatattatgagcgataaaggtgttgatttaattgtttacttactgttgacgttaggtgcgagtgcaataggctggtttaaggcttccaaggagaaaaaagcaaaaaatacacctcccgaatttcatcttccggaagaagaacatgatgatttggatgatgagattgtcgtgatttcacaagaaccggaaatcccatctccggagcctgtttttgctccgatatcaaatagcgatgaacttgtagaaagagcggggagagagataaacgtgaataattttggtaaaacagatgaagaacgttatgccatgcttgagcaactacaacaagcaagaaggggaagaaataaaaaagaagctattctctttaaggaagaagaagagtctaacgagcaaccaaataattcaattaccgaacattttgattttgatattcgtcaagcgataatttccagcgagatattaaatcgtaaatattaattagaaattaattccgattccagtggagaacgtgaacgagtaaggtttaaaatcaatttctgcactcttactcaaggattgtaaataatatttgaatcccggttccacttttatgtggattgattttgaaaggggatactcgataccgaagccgatattcgtactgatattaaacgttctaatgtcctcggcttctcccataaattctttcttcccattgtaattcacgtaagtatggttacgtaccataaaactggcaccaaacccacctaatacactaaattttactctattatcattcaaatgataacggaaaattaaaggaatctcaatagcatcgaattgctgctcgatacttccgtcttcatcttgttctgtttttaatgaaacaaaggtttcgggagaggaaacggttgcattggctttgttttttacgctaccaagtggggtataggcatgagtgttagcattatatgacaccatatcggaacgaggcacatacacttgtgcatcatccgtcttttgtcccatacgggaataccctaaaccggtttctatagagattcgtttagtcggttttacggcgaaagtcaaccctccacctacattaaaaataccactcatctggctactttcatactgggcggagcgggcatttgttccactcgttttatagctcccggacgaatatccgggagagacatatccacctacagtaaacattttagcatcttctgattttactttattggtagtctttaccgtgggtgtatttttcccatccaaaagttccgtgtatttacgttgattttctatcgcattttgatttaccaaagggataaaccctgcacgaacggatgtttttttcaaatcaccttccggctgctcgttctccaaactggttaaagtggaggtagaaaccggaaccggagcaagatgctctacggtatattcttctcttttcttctttatttctggtattgaatgaggggtagaagtaaatgctagtatcttattattatcctgattgttaatgtttgagtttagagtggcaacagatgtcggagtatagatgtttggatgtttgctttgcatgaaaaatcccacgccgaacaataatattaccgctgcagcaataccactatacgtgtaaattcgccttagacgtctttgcttcatcacgaaatgggagtttattccttcccacactcgtgctggaggttcaacggaaacttgttccaaagcgtttttaaataatttctcaatcttctcactcatctctcaaatatgcatttatcttccttttcaaaatttctttcgcccgtgccaggttagatttcgatgtaccgtcggatatacctagtaatgctgctatctccttgtgttgcatgtcttccatgacatacaagttgaagaccagccggtatttctccggtaattgattgacaaactcgaacagcacctcgggaggtatgctcacgtcatcatcaacatcatcttcatccaccacttccggaacttcttcgacaacttgcacggatcgattttttctgaatttctctaacgccgtgttgatgaaaatgcgcttcatccaaccttcgaaagatccttttcccttgtattggccaatggactccaacactttgataaaaccatcttgcaaattatcttccgcctcttcgcgtgatttggagtattggatacatacggcaaacattttagccgagaacatatggtaaagttgttctcccgcttttctgtctccctttttgcatcggtctactattttgtccaaattacacattgataactattgcttagatgcgctattttgtaaatggttgcgttcactacgcgaaaaaaatgaaaaaaaaccattatcagctaaaaagctgtctttttttttgcatcgtattgtttttttgcgaatcttcgcagtgtgaaatgaaaatatgtggtgataatcatggaatatttaaaactataaaacaactaaaaatgaagacaatcttaaatttaaaacagtacgtaattttattggttgcggctttcgcaatgacatcttgtttggatagtgacgatccagattttcaagttgtaggaggaggatatattattcaagttaacaacacttcaactccaagtttttttccaatggtaacaatctctgcaaacgaacccatgagtggaggatgtcaagtttctaatgggaaaacaaatgtttctttgaaagatattgaagggtatgcgaaacaagctgttcaaaccgatgcgagtactcaaatattgcttgcaaaagaattaacagaggtaactgggcagtatacgattaaagcagtaaatggcgcaggggaagctgctgaaagttggtttagtctttctgcttccaaagggatgggggcattagaatcaaaaattgaatgtggtgatgatggaaaaattaccgcttattttaagttagcagaagaagctgattattattacattttcttgcaaaaagatagttatgatctttctaaatatggatcaaaatactggagtgaaactgacttaaagaaagtagaacctgaaatgaatggacagtacgaggggtactacaaacttgttcttaacgtgagcgatttgttatctagttcatcaacagaacttgcttctggaagatataaagttattgcagctgctgcgattacaggtacgaactacactaattttcttgtattacaagaaggagattacgatacttatacaaagtagtaaga

SEQ ID NO: 483 - DNA, 3266 bp, Butyricimonas faecihominis
cattctaaattctaaactctaaattctaaattaaaaatatataccatgcaatacccgcgactttcccgatacccgaaattccatgccccggtggcccgacgcctgtttgtgatcggcttgttgttgctgttgatgctcccgagtgtggaggcacaacggaaaaaggtaggcgtcgtgttaagtggagggggagcgaagggcgtggcacacatcggcgtgttgcaagtgctggaaaaagcgggaatccccgtggatgtcatcgtgggaaccagcatgggctccatcgtgggtggtctgtatgccatcggttattcggctgatcaactggatagcctcgtgcgggtgcaggattggatgttccttctaagtgataaagtgaaccgctatgacctgcctttcggggagaaggaacaggatggcaagtacttgctttccgtcccttttgaccgggggaaaaagcgtccgtcaggttttatcagcgggcagaacgtgtataatctcttttccgatctcacgatcggttatcatgattcccttgatttcctgcaattaccgatcccgtttgcctgcgtggcggcggatatgttccaccgggaagagatcgtgatgaagggagggaatctcgtgcaggcgatgcgggcgagcatggctatccccggcgtgtttaccccggtgaggacgggtgaccgggtactggttgacgggggtatattaaataatttcccgacagacgtggcccgtgagttgggtgcggagatcgtgatcggggttgacgtgcaggccgatttgatgaaggaggacaagctggagtctgtttccggcgtgatcccgcagatcatcaaccttctttgcatgaacaagcacgaggcgaacgtgaagcttgccgatctggtgattcgtcccgatatgaaaggatacacggccgccagtttcagcgcccgctcgatcgactcgctactggcccggggaaaggtggcggcactgcaacaatggtccgagatcacgcgggtaaaagaattgatcggggagtccgggaacgtggacaacgagatcccgaaagcccgtcaaccggagaaaatagccatccggaatgttattatccggggactgtccccgcgggaggaaggatgggttcgtcggaagatgcggatagaggcgaatagcgagatcaccttgaatgatattcatcgtgaaatagcgattttatacggcacgaaagcattcgtggcggtgaattaccggttgctggggacagctccctacgatttggagttaagcctgaaatccaatcccatgagtacgttgaatatcggtttccggttcgattcggaggatatggcggccatcttgttgaacacgactttaaacaacaggagcctgcgggggtcacaactggcattaactgggcgtttgagcaagaatccttacgtgaagctggaatattcactggaaaataccttcttgcgagggtttaacctcgcctacatgttccgctacaataacgtggattattaccggaaagggaagaaaacgaataacgtgacttatcgttaccacgcgggggaactggggctgtccagcctgtacctgcgtaattttaagttcaaggtggggttacgctacgagtattttgattacaattccttgcttttctccaacgaggacgaggtgatgagcgttcgtcccgagggctttttcagttattacggggtggcggaactggacacgtacgatcgtcggttctacccctcccggggcgtttccttggaggccgcttactcgttgtacacggataacttggcgacgtatgacgggggatcgccgttttccgccctgtcggttcgtttctgcccggttgtttccctttccgaccgtttgaaattactaccttccgcgttcgggcgggtgttaatcgggcatgatcctgcctattcttactttaataatctcgggggaacggagttcggacgttacaacacgcaacagatgcctttcgtgggaattaaccacgtggaggtattcgagaatgccgtgatcgtggggaaattggagttccgccaacgcatggggcgaaagcactatctttccgttatcgggaactatgccctgcaagatgataacttctttgacctcttcggtcgtaagggtatatggggcgggggaatcggttattcccgggactctatgctgggaccgattgatctggtctttactttctccgactggtcggaaaagttagggtgttactttaatctgggattttatttttgagggggtagttggaaagttaaaagctaaaagataaaaactaaaagttgaaaatcaagaagcgtcgccccgtgtggctggaatttaaaatttaaaatctaaaattaacggcagcgtgagctgccgttataaacctcacgctcctaaggtcatgtgaaccgagttagaggtaattttcccgtcagcggttatggcgagactgtagacgtggatgttctcgggcttgacgaaagaggggacgacgatggtggtcacgccgttttcacccctgtcgcgtagttgctggacaagagcgaaatggtcttcgggactgtagatgacaccgtaaatgcggtcgtccgcccagcagtaggcgccctcgtaaacggcggattcctgcgtgaaggtgatgctatacatctcgccctcctcggcggccacggcgggagtctccgcgttggcgagggacgcgaagagggaacggagcctcgttttctcggcgatgatctgctcgcggctcaagttggccttgctgacggtcacggaaggaatgagcaacgggccggcggcgaaaaggactttcgtccagtcgatctcgctggtatactcctcgttggcttttttcttcgggtcgacgggagagtccgggtgaatcttcgtggtggtcagcacgccttcgcgtttcttgttaacgctcgtgaaacggttggcccacttgacaccgttcgtgtcacggggaaaggtcacatggagtaccgggttcaggtaccgaacctcggcattaagggccgagaagcccgacgcgttgattttttgctcctcgttcaggggcgcttgcttgctgttcttggcgcggcagccgacctcgccgttgcctagattggagaatacctcgttagcgactttcccgctcttctggtaaaagttggttgattttattcgtgccatactttcgagtattagataagtatttcaaaacgcctttccccacgcttcgaggaaagcacatggtaaaggta

SEQ ID NO: 484 - DNA, 3266 bp, Butyricimonas faecihominis
aatataatgagtacagcagaattacaagaaacggtctttttcatcctggcaacggttatcgttgtctgctcgatcctgaccgtgacgaccaaccgaatcttgagatcggcgacctacctgctattcgtgctttttgccactgccggaatatatttccagttggaatactcattcctaggggcggtgcaattaacgatttacgccgggggtatcattatcctgtacgtgttctcgatattgctcaccacggcagacaaaagcaaggtgagcaggttgaagaacagcaagatgtttgccgggctaatcacggctctcgccggggcggcaatatgtgtttacatcacgttaatgcactcgttcggtccctctcgcttcgtgggtggggagatcaaccagaaagtcatcggaaccgccttgatgggcacggagaaataccagtacctactccccttcgaggtaatcagtgtcctgctattgacctgcatcatcggtggaatcatgatagcgagaaaaagataaagaaaagtttaaaatgtagagtttagaatgaaaaagattccgtgattgccgattcgatgattgagtgattaaaatcacttaatcggaaatcactaaatcacttaatcgataaaatcataaatctaaaataagtatatggaactacacatggaatattacttggtgatcagcacgatcatgcttttcgcgggaatttacgggttcatcacccggaggaacctgcttgccgtgttgatctcaatcgagttgatcctgaattcagtggacatcaactttgccgtgttcaaccgttatctcttccccgaacagatggaaggctttttcttcaccctgttcgccatcggggtttccgcttgcgaaacagccgttgccatagccatcatcatcaatatataccggaacatccgcaatatacaggtgaaaaacttgaacgagctgaaagaagaagagcaaaggaatggacaattgaaaattgagaattgaaaatgaaaaaccaactaccccctccgactcccccttgcacagggggagagacgaacgcgagaaggcgccacgatataacagtgccgcgtgttctccccctgtgtaagggggagtcggagggggtagttggaagcgtccgcaccgtgcggctggaatctaaaatctaaaatctaaaatcaagaaatcaatacatggaatacacagttttaatattgattctaccattgctgacatttctagcgctaggcttgttgggtacgaaattgaaacccaccacggccgggagcataggaacgttatctttggcgatatgtgccttgctagcctacatgacggcatggcaatatttctcgatgccccgggtagaaggcgtacgcctcccggtcatcccgttcaacttcgaatggctgcgtttcacgcaatacctgcatattgatctgggtatcttgctagacccgatttccgtcatgatgctggtagtaatcacgaccgtatcattgatggtacacgtttacagtttgggatacatgcacggggaaaaaggtttccaacgttactacgccttcctttccctcttcagtttctcgatgctgggtctcgtggtagccacgaacatcttccagatgtacattttctgggagctggtgggtgtttcttcctacctgttgatcggtttctactacacgaaaccggaggctgtcgccgcatccaagaaagcgtttatcgtcacccggttcgccgacctcggtttcttgatcggcatcctgttgctctcgttctacacgaaaacattctctttcgacctgttaacttcaggcgactcgtcactctttgccggggctgccgggacgaccttcatgggatgttccgtgatgagctgggccatggccttgattttcatgggaggtgccgggaagtcggccatgttcccgttacatatctggttaccggacgcaatggaaggtcccacccccgtgtcggcactgatccacgcggccacgatggtggttgccggggtttacctcgtggctcgcttgttccccgtgtattacttcgaggcccccgaggtactcgtgctgatcgcggtcgtaggagcggtcacttccctctacgcggcggtagttgcctgcgtgcagacggacatcaagcgagtgctggccttttccacgatctcgcagatcggtttcatgatggtggcgctcggtgtctccgggatggaaggccacgaaggcttgggctacatggcatccatgttccacctgttcacgcacgccatgtttaaagccttgttattcctcggcgcaggagccattatccatgccgttcacagcaacgagatgagccacatgggtggtcttcgtaaatacctgcccgtgacgcacatcacgttcctcgtggcttgtctcgctatttcaggtatccccccgttctccgggttcttcagtaaagacgaaatactggccgccacgttcatgttcagcccggtactcggtgtcgtgatgagcttcatcgcggccctgacggcattctacatgttccgcctctattataacatcttctggggtaaagaaagcgcgcatgaacacaccccgcacgaggccccgaagagcatgactcttcccctcgtattccttgccgtggtaacacttttcgccgggttcattcctttcgggaagtttgtcagtagcaacgggatggaatatatcatccacctagactggacagtagccggcaccagcatcgttgttgccgtggcttccatcgctcttgccacgtggttctacaaaggatcgaaccccgtaccggatcgtctggccaccacgttcagcgggttgcatcgtgccgcttaccgacggttctacatggacgagttgtacctcttcatcacgaaacgtatcatcttcaactgcgtatcccgccccatcgcttggttcgaccgccacgtgatcgacggatcgctgaacagtctggcaaacgtcacgcaacgattgtcttactctatccggggattacaatccggacaaatacagcaatacgcttacgtgatcctgttcggctcgctattaatactggtcttggttttattaataatgtaaaaatggaagagtttataacgttcataaagtttataaggtccataaggtcacgggtgtccttcggacagtgtttatcggcagctcctgctgccgtggacaaagcgccccgcaggggtccacgaaccttatgaactttatgaaccttatgaactttatagactaataaat

SEQ ID NO: 485 - DNA, 3242 bp, Butyricimonas faecihominis
gctttacgggtagcctccttagattctggatttgtgaagcaggagagaaagcgattacgttatataaaaaataatcatttagcttcggcggttgtttatggagaagtggaagacagagaatcggatttgttggaggatacttatgccgagttacaaaaggccgtaattgaagatacgacttcgtgggagattccggaataccgggagtcgatggatcgagtgatgcatgcattgattagaatgaaagagttgaaaggatcattttatgatatatctttagaattgttacgtcagacgatatcaacgtttaaagacgaacggttgattgaatatattgtgaataagaatgtgatggcttacatgaaagctttgagtgtaggtactacaggtgagatggattcgatttttaggaattgggtacatcagccgattttagtggaggcttacgacaacttgtgtcgtgcaaatagaaagttggaaaaagggcagccagctgttccgtttacatttccggatatcaatggtaaagagataagtttgtcggattttaaaggaaaatacgtgtatgttgatttgtgggcaacttggtgtggaccgtgtaatgcggaaatcccgtcattaaaaaaattagaggaagaatttcaaggacgaaacatctattttgtgagtatatcttgtgataaaagtcaggatgagtgggagaaatttgtgaaagaaaggcaaatgggaggaattcaattacatatgcggggtgataacaaatatatggaggaacttgggaacaacgggattcctcgttttttgttaatagaccgggaagggaatttcatagatgctagtatgtcacgtccgtctgatccaaagacactaaaaatattgcgggagttggaaggaatctaaatgtattaaaagtaaaatagaaaaaggctcgttgaaaatagattatgtctattttcaaggggctctttttttgtggatattgttgtatatttgtgcagatggaacaggattgatatatgataagaatgtataactatggacgataacgggaaacacttgactgcgggacttaggagaggtaaggaagaggcttttgcttatgtgtttcgtatgtattatagtccgttattaaattatgccggacgtattttgaaagatgtggaggcagcgaatgacgtggtgcaggagtgtttttgtcggttgtacgagcggcgcagagaattgcgtaaagaacttcaggttcgaccttatctttataagtctgtttataatgcttgtatggatgcaatcaagcatcagaaggtggagagtaattatatcaatcaggaattattagatttttatttttcgaaagtcgtggagactcccgaggcggagcaagctttgctggatgaggatttgaagggagcgatacaggatgctataaataagttgccggaacgatgccgggagatattcgtgttgagcaaagtggatggactttccaataaacagattgccgaacaattaaatatatccatgaaaactgttgaagcacaaatgactacagcttttgttcgtttgcggaaagagttgggatggttgttgtgctttatttttattcaaaatttttgaaaaatctctaggggtaaatttgtctttagtcgttataaggatataacggataaagatatgatacaagaatctgataaagatgaattgattttaaaagttttggacgggatagcaacaccggacgaaattcagactttggctcgatggatggaaacggatccgtcgaacgaggtttattttgatcaattgaagaaagcttggaatttgacgagtgggccaattccttccgaagagagagtggaacatgagttgggtaattatatggaatatattcgctctaaacatcggaagtattctattgggctacttttgaaatatgcagcgattgtcatgatacctttattgtccgtgatttattggttacaactggaaaaagatgaaattccgtctcaaatggctgtcggtaatccgggaattataccgggagaacataaagccatgttgataacagcccaagggcagacaatcgctttattaccttctcaggaaagagatatttgcgtgcaggaggattttgtggtgaaaaacggacaagctggaattgtttaccaagattcgaaaaaggctgtttctacgttacaatataataccttgaagactccacgaggaggtgagtatacggtagtgttgtcagatggaacgaaagtgtatttgaatgccgcttcagagttgaaatatccggtacaatttgatagtaaaaagcggcaagtgcatttgtcgggggaggcttattttgaagtggcaagagacacgaatagaccattttatgtggtaacagatgccgttcgggtaaaagtttacgggacggaatttaatgtgaatacttatggtatcggtggaactcagaccacgttagtatcaggtaaagtggggattcggggaaagagttcgggacaggaatatatgatggagcctttacaattggccgagtttgatgtgaatggggaatttaaaggaatccgaaatgtaaatgctgggacttatacggcttggaaagaaggttttttcgtgtttgagaatgagggattggaagatattttgaatcgtttgtctcgttggtatgacgtggatgtgttttatggaagtgaaaaagtgaaaggatatcattttaccgggcatatggagaaatatgaagatgtagaaattattttaaatgcgattagtaagatggttggtgtacattttacaataaaggatagaacaattgtagttacagaataaaaagcggagagtgttaacacaccctccttgttgtgttaagcgatagaagtcctaggaaaacgtactgtcgctagtaataatttaatattgcgaatatatggaaaaaaaacgattatgtctgtccctaggaggacatagaaaacgaaaaattttgttagtgatgaaactatgtatttcattgttgttatgctttacgttgggtttgtctgcatcaacgttagctcaacagaaacgggtaaatcttgatttaaagcaagttccgattaaagtattatttgatgaaattcaaaaacaaactaatttgtcatttgtaatacagaacagacggcgaaattaggagaggtttccgtacgagcaattgacgaaacggtggagaatgttttgcgtaaagtgttgatgaatacggg

SEQ ID NO: 486 - DNA, 3227 bp, Butyricimonas faecihominis
cttccatcgtattaacccaacaatacaaaatattcaccacctaaaaaccacctatcgcatccattgaattgatttctcaaaaataataaaatctaaaacaaaacctttttttaatgctacttttgtctctaacaatttttatttactcggatgataaaagaaaaattacccacgggcaagaaagcaagtaggacactcttggaatgtcagcatgaactattgtcccggtttaacaggcaaggtaaaccaaaaagtacttccttgattttcctcggaaatcaccccgatctctccccccaacttatggacaatcgtctgacaaatggctaatcccaacccagttccgtttgtaaaactatccaatttgacaaaacgtttgaagatttcatcttgcttttccgcaggaattcctttccccgtgtcggaaacaaagaaacgcaacccattctcccgctcctcgtaaccaaaatggatatgtccctcgtcggtaaatttaagcgcattattcaggaaattcgaaatcacctgcatcacccggttcttttccgtgtaaataacacatttatccatatgggaagtaaaagaaatatcaatattaggatgttctatattcttctggcgataactcatttccaatccccgcaacatctcgtttatatcaaccatatcataaataaactccaacgttcccgcctcgatctttgataaatccagaatgtcactaatcaactgcaacagtaactcattatttcgattaataatagccatgtactcctctttatccttcggatcatccgtgttaaccagtaattcactgaaccccacgatagcattcaggggggtacgaatctcgtgactcatattggacaggaacatcgacttcaaccgatcggacatctcagccgcttccttcgcccgtttccattcattggcaacccgggtgcgttcggaaacatcctcgtatttcaatacaactccccgaatctgcctctcgttctttatatcataaacaggcgtggccgtgatctccaccgtaaacccgtcatcaaaagtaacttccttcatttcccgttttcccgtctccaacgctttctgcatcacgcaccccggacaaggagaatcccgatgcatcacgcttttgtagcaacacaacccggccttatacctaccggccagcggatgctcggaatactgggccaagttttcccactcgatcatgtaattcgggtgaagatacactaatccattattcgagtgatcaagaataagctggttgatctcctgaatcttttccacattctgtttcgcctccatcaaggttttctcgtataacttactctcggttatattacgtaacgtcccgacaacccgcaggggtttccctgtaatatcttttttctcgatcgtcaaatacaaatcataataatctgcatacacccccagaacatcataacgaatctcccggtgcaaattatctatccgtccattctttatatctgcgaaaagccgggacatgacctcccgatcgtccggatgcatgtaatcaacagcctccagcgaggacagaccatcccgttctttacaaaaacctttattttcaactttaaactcgggatatttaaaccggataagatcatcttccaaatcccagatcatcggaaccgtgttcgtaaccgagaaagccatccgcaattgctgattcacctcttgaagttgttcttgtatacgaataagatctgttatatcccagcgagtggccagtaaccaatggtgtatatcgttggacaccacatttttattcacgatagaaacgtgtctctcgccgtcaggagtctcgtatacttcttgcacttgataagaacttccttcttcaataattttaaaatcgacatcccggtaatgctcgcctcgttcctttccatacacctctatatcagtcttaccgataatttcttcccgagaatatccaccctgtaactcacactgcttattccagaaaacatacttcaaatcatcatctatatcctttatgatcagaggcattggcatattgtccagcaccgcattcaataatcgctgattctgttttatcgcaacttcgttctttttccgtcccgtaatatcccgttcaaaacaagccaccaaattttcctgtacacgcttgaaccgcccctcgtaataggttatcttaccatgaaccgacacggtatactccacctcgtacactttatccgaaatcaacgcttcccgcaaattggatatcacgatgtctacaaacgggggatcaacacaatccttcaaattccgaccaatcaatgcctccaccggtaaagaaagtttcacaggatctgcattataaattttttgtatattaaactggttatctaccatgaaaatcatgtcggggacagaggcaataaccttttctgccataatattttccatattctctcgtggaataaagatttttctcctacgagaaaaaaagaagatgagatttcccaaaatcactactccagctataacatatccccacatggcaatcagatttaatttttacgcaatatattgcaaatataacaataataaattaccaaacaatccctttatcgcaccatgatcgaattaaaaagccgtgctgacatcagcacggctttctaggtacaaattaaaacttaaacttattcacttaaatatgcacgtagcatccataaattcttctcttgctcggaaatgtaaggattaatcatatcttgagttccatcatcaccgatttctgcggccaaagccaatatttcacgttcttttcggatcaatatccccaaattccccacaatctcctttacgcaacgattcccgtcggaaacccccgttacctctttaatctcagcctgtttcatgtaagcggaatacgaatgtaacggggtaccctccaacgtaagtacgcgttcagcaatctcgtccaccttctcgatagcatcattatagtactcttcaaacttagcatgcaactcgaagaagttacttcctttcacgttccagtggaatcctctcaaattctggtaaaatatttggtaatttgccaacaaatcattcaaatggtttactaactcttttgatttctctttgtctaatccgattaaatttagtgttttcatattatttgatttttattaattactattctccttatttttctgatacaaatatagaataagtaatattat

SEQ ID NO: 487 - DNA, 3222 bp, Butyricimonas faecihominis
gcataaaaagtgctgcacaaattacgcaataattatatgatttattatgagtgatatagcgaatccttttctcgtgtatggttatgttagtcccaagtatttttgtgaccggcaggaggatacccaaaaacttatttccgcattgcagaatggtcggaatgttaccttgatgagtcctcgacgtatggggaaaactggattgattaaaaatgtcttttatgaggttgctcgtcagaaaccggaggttgcctgtttttatttggatatttattctaccacttgcttgaatgattttatcattcttttagggcaaacggttataggaaagttggactccttctcacagcggacattggcatcgttaaccggtttttttaaaagttgtcatttggtattttcttctgatccgttgagtggtgtcccccaagtgacattagatttccaacctacacaggctcaggctacgctgaaagagatttttgattatttgggtatgtccgggaaagaatgttatatcgctattgacgagtttcagcaaattgttgattaccaggaaaagggtgtggaggggttactacgatcttatatccaatttcttcctcatgtacattttattttttcaggtagcaagcaacatcttatgaatgaaattttttcctccgtgaaacgacctttttacaggagtacggaaaagatgactttgcagactattgctaaggaggcttattctcgttttgctcgtgattggatgaaacgaggaaataagcaactggatgaagacgtatttgatgaaatctatgaacgtttcgggggacatacgtggtatgtgcaatatatcttgaatcgtctttatggacaatcgaaatcagtgattgacagaggggtggttgaggcttgtctgacgagtataatacaatcggagattgattcgtatcagttactatacgggatgttgaccgagaatcagtccacgttgttgcgtgctatcgcgagagagggtatcgtcgctgccatcaatagttccgctttcgtgaagaaatacaggttgaaaggtaccagtagtattaatacggcattgaagtttttgttggacaaagagtacgtttttagatcggagagagggtattgcgtgtacgatcgtttcatggaattgtggttgcgttcgttgccctatggtaatctgtgatgagacatggaattcatctggttgaaacacttcctttgacgagggtacttggtcttgagttttgatataattatttattgctatcgttgttccgataaggaaaagaacgatagctaagattaatgctcttatcatagctttcggtttttggtgaatttgattttacgggaaatgcgataataaggttacaatgcaggcctttggcggtgtttactccatcagttctttgattttttgttttaaggattcaccttttaggttgatagcgatgattttagttcggaaccgtgataaggccatagtaaaccgtcttcttcaatgcttccagccactcggatttgtcgctatccagagaaatactgatgatttccaagccttgggaattgaattcattgtagagggctatcatttccggatttgtttcccggcagatctagaatgaaaagttctttacggtaacgaatggtcggctttcttcgtaagaatttccaaattctttgttagctttgtgggaatgatgaaagatatgaagacggttatagatttatttgaaagaagttgcgaaaagtttccggataatccttatttatgggaaaagaaaaacgggaaattcgcggctacatcatatatggaggtaaagcgagaagtattgaacttcgcgggtgctttgtgccaattaggagtggataggggagaccggattgcattgttaagcgaaggctgtaatgcttgggtgtactcggaattgggaatgttatacgccggaggcgtgaatgtgccgctatccattaagttgacggataacgaaattgtttttcgggtggaacactctcaagctcgttttttgatcgtgtccgcaaactttttgaatcgagttcggggaattgaagggcgaatcggaggggtggaaaagattatcgtgatacattcagatataaatgaaggtaaatacgtgtcctttgagttgttacaacgagagggggagatttggcggggagaacgcgagaagttgttgaatgaccggattcatgccgtgacggaggatgatctggtaaatatttcttatacttcggggacgacggcggagccgaaaggaatcatgttgtcccaccggaattacgtgacgaacgtgttacaatcagattccttgatacaaatcccggcatattatcggatattattgtttttaccatgggatcatagttttgcccatacggtagggctttactcttttatgtataacggggcctcgctggcttctgtcgattacgggcagtcgggaatggagtatttgcgtaatatcccggtgaatttgcaggaagtgaaacctcatatattattgagcgtacctgccttggcgaaaaatttccgcaagaatatcgaggcggggatcaaagcgaaaggacgttttacagatcggttttatcatctgggattgaagattgcttatacatataatggtttcggggacgatcggggacgaggatggaaggtgttgctgaaacctttggtgaaattatgggattctcttttattctctaaacttcggaaacaggtatttggcgggaaccttcgttttttcgtgggaggtggagccttgctggatattgaattacagcgttactacgcggctttgggaattccgatgtttcaagggtatggtttgtcggaggcctctcccgtgatcagttcgaacacccccgggcgttatcgtttcggttcttccgggatattggtaaagccgattgatttgaaagtttgtgatgaggaaggacaggaattacctcaaggacaaaaaggggagttgtggataagaggaggaaacgtgatggctggatactggcgaaacgagaagagtacggccgagacgatcgtggacggttggctgcatacaggcgatttggggtatttacatcccgatggctggttgtacgtgctgggacgtttcaaatccttactgatcgcgaatgacggggagaaatacagcccggaaggaatcgaggagaccattgccgaacagtcgaaatatatagatt

SEQ ID NO: 488 - DNA, 3210 bp, Butyricimonas faecihominis
agatataaaaatgcttcctatgagtaaatttatttctatcgaagaggctgtatcaaaagtaaaagatggtatgaccatcatggtaggcggattcctcgcaaacggaactcctaacaaaatcgttgatgcgttagcgaaatcaggcgttaagaacctgacgttgatctgtaatgacacggcttacccggacaaaggagtaggtcaattgattgccaacaaacaagtaaagaaacttttcgtgtcacacatcgggacgaacccgcacacgagcgaacaaatgaatagcggagaacttgaaatcgaattctgcccgcaaggttcattggcagagcgtgtacgtgccggcggttgcgggctgggaggaatcctgactcaaaccggaatgggtaccatcgtggccgaaggaaaacagatcgtcaacgtggatggcaaagactacttgttggaaaaaccgttgagagccgatatcgcgttggttggcgccagccttggagataaagcaggaaatctggtttaccggggaacatctcaaaacttcaacccgttaatggcttctgccgctgatttggtaattgccgaaattaacgaactggttgaagtcggtgaaatcgccgcagagaacgtgaagactccgtcaatcatggtggacttcataattgaaaattgaaaatgggttctcaatttaaaatctaaaatttaaaattaaaggaaatggaaaaatcaatgataagattaagaatgagtgcaaaagacgctcattacggtggtaatttggttgacggggctcacatggtacatttattcggagacgtggccacggaattattaatcatgcatgacggtgacgaagggttgttcgtggcatacgacaacgtggagtttttggcacctgtttatgctggagattatatcgaggctaccggagagatcgtgaaagtaggaaattcttctcggaaaatggttttcgaggcaaagaaagtaatcgcatccagacctgacatttcggcttcagcagcagacgtactggaagaaccgatcgttgtttgccgtgcaagcggaacctgcgtggtgaaaaaagaagaccagagaaagaaataatctaaattattattatggagaaattaattatcacagcagccatttgcggggccgaagttaccaaagaacaaaatcccgccgttccttatacagtagaagagatcgtgagagaagcgaaatccgctgtagacgcaggcgcagctattgttcaccttcacgttcgtgaagatgacggaaccccaacccaaagcaaagcacgcttcaaagagtgtatcgacgctatttataaggtatgcccggacgttatcttgattccctccaccggaggagccgtgggaatgaccgctgaagaacgtcttcagccgacagaactgttccccgagatggccaccttggattgtggtacctgtaacttcggagacgaggttttcgagaataccatgccgatgatgagagacttcggaaagagaatgttggaaaacaacatcaaaccggaatacgaatgtttcgaaatgggacatcttgacaccgtattaaccatggctaaaaaaggtcaggttcccggagccccgatgcaattcaatttcgttctcggtgttcccggatgtactcctgccacggtaccgaacctttgctggcttgtaaacgcaattcccgcaggttctacgtggactgcaaccggaatcggtcgtcatgctttcacgcttgcagctcccgctatcgcaatggggggtaatgtgagagtaggttttgaagacaatctttatttggaaagaggcgtgttggctaaatccaatggtgaattagttgccaaagtggttcgtatcgccaaagaattaggtcgtcctatcgccacctccgcagaagcaagagaaattttgggattaaaacctttaaaataatcgatttataaattttcaaatttaatcatactatgcaaaagaaaggaaataaatacggaacccaccgtgtaatcgaaccaaagggagtattaccacaacccgccaacaagattgacaacaacatggacgagatctacgacaacgaaatcttgatcgacgttcagactttaaatattgactcagctagtttcactcagatcgagcaacaagctggtggtgataaagcaaagatcgctgaaatcatgatggacattgttgcaaaacaaggaaaacatcgtaacccggtaaccggatcaggcggtatgttgttaggtacggtggagaaaatcggtgatgcattgaaaggcaaaatcgatttgaaagaaggtgataagatcgcaactttggtttctctttctttgaccccacttcgcattgacaaaatcaaagatattcgcccggacatcgaccaagtagacatcgacggtaaggctatccttttcgagagtggtatctacgccaagatcccggctgatcttcctgaaaacttggccttgtctgcattggacgtagccggagctcccgctcaaaccgcaaaattggttaaaccgggcgataccgtgttaatcattggtgctggtggtaaatcaggaatgttgtgctgttacgaggctaaaaaacgtgcaggcgttactggtaaagtaatcggtttgtgccacagccaaaagagtaccgaacgtttacagaaacttggtttctgcgactatgtattctctgccgatgcaactcaacccgttccggtaatggagaaaatcgaggaattgaccaatggtgaaatgtgcgacgttacgatcaacaacgtgaacatcaccgatacggaaatgacttctatcctttgtacgaagaacacgggagttgtttacttcttctctatggcaaccagcttcacgaaagcagctcttggagcagaaggtgttggtagcgacgtgaccatgatcgttggtaacggttacacgaaaggacacgcagagatcactcttcaagaactgagagaaagcgaagctttaagaaagatctttactgaactttacgcttaataattaaagatttatgaagatgtctcaaaaactcctccgtcagtaaagctgccacctcctctataaacagaggaggagttaaattactacccggtttcaagaagatttacagctctccctctgtttatagagggagtacggcggagccgggagggagtttttgatacatcttcataaatcattaaatttaaaat

SEQ ID NO: 489 - DNA, 3197 bp, Butyricimonas faecihominis
caatagagccgggggatattcttcgacaacggttgtatgttgtaacacgaggaaatatcacgggctacttgtattacctatctcggagttcgggggagagaatcatgtattactttcctctttggatgagacggttgttcaacacgggcaatcttttaatttgggaatccataaatatcccggggtgtatgaacctaggggacataaatatatcgtggatctggcttatgatccattgttcacgttgacttaccgggtggggggcgtcgtgctgaagaaagaaattttgatggtacataacgaagctcaattgatggttcgttatacattggaagatgctcactcggagactttcttgcggttgaagccgtttttggcttaccggaatgttcacgctttaagcaaggcgaacatgatggcaaacacgaagtttgatcacgtggagaatggtatccgttcaaaattgtatgtcggattcccggctttgaatatgcagttgagtaaggaaaacgagtttatacctgtgcctgactggtattataatatagagtatctggaggaaaagaaccggggatatgattataaagaagacttgtttgttcccggttattttgaagttccgatcaaaaaaggagaaagtattatattttcggcttccaccgaggaagtaaaaacttccaccttgaaacgtaaattccagcaaatggaaaataaaagggaacgtcgggatgactttgaaagttgcttgacttattcggcttcccagtttattgttcacgaggggaaagatacggaggttgtggccggttacccgtggttcggacgctggggacgcgacacgtttattgcccttccggggttgacgttagctgccggagcgaatttgaaggactgtaaagaagtgcttgataccatggctcgccagttacacaatggtttgtttccgaatatcggtaaaggagataaggctgcctacaattcgatagacgctcccatgtggttcttctgggcggtgcaggagtacgataaagctcaaggagagccgggcgttgtatggaaaaattatggcgggaaaatgaaatctatcttgaccgctttccgggaaggcgtgaatcccgggttacgaatggacccgagtggtttgatctgggcccgacaacccggaaaagcactgacatggatggatgctgttgtgcggggagttcccgtgacaccgagggccgggtatgccgtggagatcaacgccctttggtataatgcagtgtgctacatgttgaaattagcgggagaggcgaaggatcaatcctttataaaggaatggcaggatatgcctgagttgattcgtaaatcgttcgtggaaaccttctggaatgaagaatatggatatttagccgattacgtggacgacgaaggtcagaatctggatgtaagaccgaatcaggtgtttgcctgttctctgatgtattccccgcttacggacgacatgaaggaacgggttctgcgagtcgtgacgaaagagttgttgacacagaagggcttgcggactttatctcccaaaaatccgaaatatcacgggcattatgaaggtaaccaagatgagcgggacaacgcttatcatcagggaaccgtatggccttggctgataggggcgtatatagaggcaaatcttcagctttacgggaaacagttcttgccggaggcgaaagaattgctggaaggatttgaagaagacatgaccgtttacgggttgtgttcggtcgctgaagtgtatgatggtgatcctccacatcatccgaatgggagtatatctcaagcgtggagcgttggggagatacttagaagtatggaattgataaggaaatatgaaaattaatcgaattagatcatttccgaatttgcaaattaatatattatgagcataaaagtattgatgtttgggtgggaatttccaccacatattgcagggggcttgggaacggccagttacgggttgacgaagggcttggcgaaacatggcgtcaaggtaatgtttgtcatgccgaaggccggaggtgatgaggatcaaagcgtcgtgaaaatcattaatgcgagtgatgtcgaaatgatgagcgagtattcgaatttggatgaatactggcagaatgtaaactttatggaaatcggttcgaatcttgttccctatctggacccggaaaccttcgaaagaacggtaaaggaaaccataaagacgggcgaacattccgagcatatcgttttccgtaacaagttccaattttccggtaaatacggaacaaacctgatggaagaagttgcccgctacgccatggtggcagggacgatagcggcgcaacaggattttgatattatccatgcccacgactggctgacctattcggctgggatcgtggcgaaaaaagtttcgggtaaaccgttggtgatccatgtacatgccacggaatttgaccggagcggggagaatgtcaaccaacaggtgtacgatatagagaaacgtggaatggaagccgccgatcgggtaatcaccgtgagcaatctgacgcggaacatcgtgatcaatcgttacggtattaacccggataaggtggtaacggttcataatgccgtggatttccagacacgggaagatattgaagtggaacggggagtgaaagaaaaagtggtcaccttcttgggaaggatcactttccagaaaggaccggaatattttatcgaggctgcgaataaggttttgaaacgttacccgaacgtccggttcgttatggccggaagtggggacttgtttaatcgttccgttcgacgtgtggcccaattgaaaattgctacgaaatttcactttaccggattcttacggggggatgatgtgcagaagatgtttttgcatagtgacgtgtatgtaatgccttctgtctccgagccattcgggatttcgccgttggaggcgatgcgtgcgggtgttcccacgattatctctaaacaatccggggtggcagaagtattaaaacattctattaaagtagattactgggatgtcgatgcgttggcagatgctatatatggtttattggcctatccggctctgggaaaaatggccggggaagagggattggatgaggtaaaccagttgaaatgggagaatgccgcgttgaaagtcgatgaagtttacaaggacgtattgggag

SEQ ID NO: 490 - DNA, 3194 bp, Butyricimonas faecihominis
atataaggtagctataaggtatctataaggttcataacggtagtagctcggtattgattaccttgtaacaaactgatatctgctttgttgggtgttaagttttgccatcaaggggacgggctgatttgttggtcagtcttcttgtgtttataaaagggaatagggttggctagctatttttgttggccagttgtccgcaagcggcgtcaatgtcttttcctttgctgcgacggatattcaccacgatatttttactttcgaggtagcgaacaaattgatccctgctggcatccgggctgtgacggtagggggcgttgtccacttcgttgtactcgataatattgattttcacgggaaattgccggcagaacaaggcgagcgccttggcatcatcgagactatcattgacacctttcagtaacaagtactcgaacgtgggacgcgttcctgttttatccacgaaataccggatggcctcggcgagttcggtaagcgggtaagccttgttaatcggcatgattttgtcccgggtcgtgttgacagccgagtggagcgagatggcaaggttgaaacgaacgtcgtcatctgccagtcgtttgattccttccacgatgccggaggtggataacgtgaggcgatagggtgacattcccaatccatcctctgccgtgatatgttcaatggctgtaaggacattctcgtagttcaagagcggttcccccatacccatcagtacgatattggataacgggagtccccgttcatctcctaggcgtttcacggcaaccacttggtcgaaaatctcttccggcaacaggtttcgggtgaaccctaaccctcccgtggcacaaaagctacatttcagtttacatccaacttgcgaggagacgcacacggtcgatttatccttgcttgggataagcacggtttcaatcaagttcccgtcgggaagggtgaagccgagtttcgtcgtgccgtcactactctcctgtttatgggtgagcgtggccgcttgcaaggtaaagtggttgtccaagaatactcggaactcttttgacaagttggtcatgtcctcgaaacgggtcactcctttttgccaaagccactgccagatttgttttgcccggaatgctttttccccgtgttgtacgaggacgtttgctaactcttgtaacgtgtacgctcttatattcgttttttccatgtcatcgctttttccgctgcaaaaatacaacaagaaaatgataagcagttcatataatggaagaatgttgtgaattaatggtttagaaaaatattttgtttttgtaagaaattgattctcttgaaattttacttcgtattagtcattattttcttcttctaaaagttttttcaattcgtcggctctaggtaaaatcccctcataatctttaggtaattcgttggccaatttgtatgtggcaacacccatcggttttgaagtgtcgcgaaaggcgaattcaacggttttcgaacgttgtgatttgcagaggataatcccgatagaggggttttcgtgtggaagacgcacatattcatccagagccgagagataaaaattgagtttccctgcgtattcgggtttgaattcgcctcgttttaattcgatggcaacgagcgcttgtaaatggcgattgaaaaatagtaaatcgataaaatactcttgttcatctacaataagtctgtattggttacctaaaaatgagaaattagaaccgagtgccatgataaatttctttatgttttgaatgatctggttttcaataactcgttcatcaatctcatcaatgtcctcgatgttgataaaatcaaggagatattcatctttgaatgattgtatggctcgtttacgataatttacattcgtgatagtttgattgaaattattggctaccgcttgtttaaaatagaatttttcattcaaatagtatcttagtttttcgacactccaaaattcagtagcacaatgacggatgtagaataaacgttcttctacatctgatgtttttaaaagtatttcataatggtgtgtgaatccgatacttgtaaaagattccaagtcagaaacattcaattcgtccgttgtcaacggacgaattgtaatagttatattttctgggattaatgaggatgtgtttttgtccgttgttgacggacgatttgaaaatatactattccagttttcgaaaaaagtacgcattttttttagactggtgatagagaatcctcgcagtccgggcaattcttgttgtaattgttgcgatatgaactctaatgcaccggttccccacgtgtttgttcgactattgaatgagatgtattcacctacggcataatatagggcgagcatttctcgattgatcaatcgagctgccgtgtaacgactctgcaaaatggcctgtttaattgcctgaatagcatcggaatattgtttgctatatgtaacttgtgccataatgaattattgtattgattttggaaatatgtggcaaagataagctattctttgtgtgaaaccgttatatgaagacgatttaaaactcgatccaaatgtcatttcgggagaagtattcccttagtttatggatggccctgctttttaggactttcacggtattcacggtgatattaagggtttctgcgatctctttcgtgtttttgccagtgagggagagttccacgattcggttgcattgcggggggagagttgcaatggcagtttgaagtagctggttggcttcttgttcgatgatggtgtcccacaaggattcttcctgttcggagtttagagaggctttttcgtggcggttcttttcacgggagagaccccggaggtaatttagtgcttcgttgcggatcatgataaataggtaattttcgatggaatccaattgtttgtgttgtccttgattttcccaaaacttgatgataacatcttgggctaaatctttggcgacttccgaatttcccgtgattttaaaggcgatagcacataaagacgcaaaatgatcccggataaaattacctaggtcaaagtgactactcatggcatctttattatttcgcataaaaaacgtttcattgatcaagcctacattttcgatacaatgttgtatgaatacggacgtcacaaacttacgaaaaaactttataagttgaatgttatgtatgat

SEQ ID NO: 491 - DNA, 3174 bp, Butyricimonas faecihominis
gtactaagaatataataaaatatggtctgttgtggggattgctgatttgggcgatggtggtgagagggcaacaggttgaaattctccacgagggggaagatccggtatggctgtcggaacagcatcagtttgtttgggataaggtgattcctttacattttgaggcggggagagcggtgtacgaggtacatcatgctccgaaagtgtttcgtttggccacggagacaggatattcgtcatggttttttgtcggggataaagatcgtgtcacggtgaccgtgttgaatacagatcctttgaatattaaagtagaaggcgatgtttccggtacatatttctacgagttggagaatgttagtcgggaatacacgaggggcaaattggagatgacggatgattacatgaaagcatggctggaaaaagatgcgactttaatgtatcgggtaaatcaacagttggagcgattaaggaagcatcgggattccgcgtatatggacgtggtggatcgggctatggaaaagggacgtttggaggaagtactggtgagggcgaatatgccgttggctctgaaaggaaagatcgtgcaggatttgaaaaaagaggggaaggttacaggcaggctggtggaagagttggatttatacacgaaggtgtatactccggattatgtgtattatttttattattacccgtacgtgtggcgggaacagattaactcgttacattcggatgaagctaaaggggaacggttgatgaacgaggtgtatcggattatgaaacaggagttttataacacgttatgtaatcggttgggagagggtatggctcgggagaagttggtcgattacgcggggagcgtgtctgattttgattattgtattggggttcacatggagctggacgagcaaacgaagcgggataccgcgttgaataaattttctgggcgtatggaaagaatgtacatgacgaggtcgggaaaggtgatgggggatttttcttcgaaaactccggaggggaagaaggtgagtttggcggattaccggggaaagtacgtgttgcttgatttctgggcatcatggtgcgggccttgcaggggattgataccgaagatgaagaagttgtacgagaagtatcatgctgccgggaagtttgatattttgggtgtttccaaggatgaggatcggggaaagtggttgaaggctttggaagaggaaggtatggcatggaataatatcttggcaaaagaggctagtttggaagacccgtctcaatttgaatccgtgacaggattaccgcagatggtggtggttgatccggagggaaatatcgtgttgagtgttagtggttcggataatatggatcgggtgatcgagacgctggaaagtgtgttagggaagtagaaaggggctgtccaaaaagtcatttttcaaactccctccccccttcggggtactccctctataaacagagggagagctgaaatactccctgtcttcgggaaaattcaccagctcctcctctgtttatagaggaggtggcacgaagtgacggaggagtttttggaaataaaatagactttttggacagcccctttattccacgtacaatactaatccttttaaatattccccttccgggtgatagatgctgatcgggtggtcggcaggctgcgtgagttggtgcaggattttgactttcctacccgtgttggctgccgcggtgaagaccgtttgacggaaaaggtccttcgtcataacctgcgaacaggagaaggtgaagattaacccaccgggttttacaacctcgatacccttgcggttcagttttttgtatccttgaatggcattgtccagcacgttttggtgtttggcaaacgcgggagggtcaaggatgatcaagtcatatttgttgtgtgatttatcaaggaatttaaatgcgtcttccacgaatgcctcgtggcgggtgtcgccgggaaagttgagttccacattttggttggttaactcgatggctctggccgaggcatccaccgaatgcacgagtttggccccacctcgcatggcgtagaatgaaaacccacccgtgtaacagaacatattgagaacattcttgtcgtgggcgtattgttcgagcaaacgtcgattctcccgttgatcgacaaaaaatccggtcttttgaccttccagccagtccacgttgaattttaacccgttttcgatggccgtgaagttgtcggtgtgaccgtacaagtagtcattcttggggttaagtcctgccttaaaaggaagggttccttccgacttgtcgtatatggcaatgagtttatctcccatgacttccaacagggctttcgtgatctcttcccgagctttatacattcccacggaatggaattgcacgacggcaacccccgcgtaatagtcaataacaagtccggaaagatcgtcaccttccccgtgaacgaggcggtacacgttgttgttcgggttggtcgccaaaccgatagctacacgtgtcagataggcctgtcggatgcgctccacccagaaattatagtcaatttcttcttccttgaacgtgagtacacgcacggcgatactcccgatctggtagtggcccgtggcgagatattcgtcgtcactgttatacacttgaacgacgtcaccttcctgtacgtcccctttgattttggctattgctcccgagaaaacccacgggtgcagtctgtataaagatctttctttaccggcttttagaactattttgctcataattattcgtgtcgcgatgcgacgttactggttacaggttgacaagttacaggtttgtctgtgacttgacggggcaaaagtagataaaaaagcggtaaaaaaataccgggaatgctattttgctgtttcccggtgttaaaatctttttgctacacgttcaaaagttcctttgccttgtccagaatggccgtgtcatccagaacgacaagtccgccgtcagggccttgttcaacatgtattccggcgctcgatcccccgttgtcataattatcggctccgaagtagttacgtacggtgtctgtactgatacccaagtcttctgcaattctctgcatacttccgtgaggtagcatgtctttgatttttctcagctcgttaaaagtaatagtataagtcataacgt

SEQ ID NO: 492 - DNA, 3165 bp, Butyricimonas faecihominis
atattatattgatttaaaattgcattcaactcttcctgagaattaaaccgggtattttcaaaaacatagtttgctacttcagccagttgaccgtatgtattcacctttccatattgtttcaattcaggaatcattgcggcactcttttgttgccggttatttttagcctcaggagccactaccaaaccatattctttttctattctccgggaaattgcctcacttcttcggtgttgatagctatcattgattttcatgtagcgtccatgtctttcttcaatgttaattgatataacgtgtacatgctgatgattcgtgtcacaatgcttaaaaacgacataaggaactcgcccgtaacctaatttttccatatattcgtcaacgacagctttcaacttatcatcttccaaatgttcatccggagaaaaattaatagaagtatgaaaaacaggtttagaaacagacggacagaaattagttatcatctcaaatgttttcaacatttcactgaaagaaggtgattcgctcataaaaccggaaacatacataaaaagagcttgcccactttcaatttttctcaaattataatggaaagcacctttaaagtttgttccggtttttatgttcgcgatcatctacttggttcttttatttttcctctgtttcttttctacatgaatcacaggttgtttaaaagtctcttttttcttatgtttcctctctttagaagacgattcaggaacaaccgtgacagtggcattagtttcacacgatgctgaagctttgggagctattctttttaaaaattcacgctttgcctcgttatatttctgcttattatcatcggtcataattcctttttctaaatatttaccgatctggggatattcagatttaggaacttccaacaaataaaatctagctttttgtacattatttgaaacgtgttcagcataacttttgagttcactctcatgcaagaataaatctttatttctttccgtttttaattcatgaaaactcccatcagcttgttggatcgcaacaatttgtatagtgtcatttttagctgcacgattaataacttttttctcccttgatttattagcaccatgaataaaaccattaattagattcttgatagccttcttgatagagtaatacgttatttttgtataatttgccatcgcatcaataacattctggttcttctccttgagtacattctctaacttcttattctctttctcaactttaatctcttttatttgttttacttgcttagtattctccggaacctttccagtaaattgaatacaatcctcctttaaaagagcatttaattgctgatgatttgtatcttgaagtttatctatactttcgtacaattttctatttacaagtgccgtagatatttcacaccccggaaatttcttctccacttgtttcaaatattcattgaactcatgttcgctgaaaaaaccttccttcttattacgagaaaacagttcagaataatgattaccagttttaagcaaaaagacctgaactttttcagttttctcttcatgcaacaccttcaattcatctattcttttagtaacagcccctcttaattcctccatatccgcaccgacgccatcggcacgatcgcttaatatagataatttactttcacgttgaacatcatttacatctaaagcatcaagatcggatccgatttggataatatcatttctaatattttctgctttgatcaatatagcatctatattcaaactattagagtctggatccagagaaacaaccttttcttcctctttctttttgtcagtttcttcactttgttccggaacaactttatccttcaccaacttttcttcttccttttggtgatcaaccggtaattcattattcttcaatcgttcgatttcatcctgtagccgacctttcacaatcgaaaatccttgttgagcttcatcaagcacagcaagaactttatttaatgcctttagttcattttctatggcgagtgaagattcatctcccggtgataaattttcattgagagtcacaataggctctaccttttctggaattacgtcttgctctaaaacacttgcttttacttctctatctgcaaaattaattgaagatttgaaagaagaaagcactctttcatcattcgtactttcaatagaaaatccaaaagaatttttaatagcatattcttcaaggatcgcataatcaattacatcattttttgtctttgataaaagcaaatcatcaaatcttttcttgcttcctctaatcaagatataagaatcttgactcgatagattatcagaaaaattaggcaattgatttgattgattttcataactttttacctgctcataaccctcgcttgtggcacggtacaatactaatacttcttcattcataggactgtcattttatagtttctaatcgttcatttttatattcagttttacttgttctaataattcatttacacggctttctaagcgattatattcttcctgtaatacattcaggtcttctcgcatgacgtactgttgtgaattgactttcttggctacctgattaatatttacaccgattttatttagctgcatattcaattctttcaataaaacattacgctctacaatagcacgggcaagtctttcgtccgtgggagaaaatgagatattcactttcttggagaaaatcaaataacgaataaaagcactaaaagaagaaaaaccagacttcttaaacttctctttaagtccctttacttcatcttccgtaaaacggatgtgtggtatctctattctatctgccataatcttcaaccgagtgtgtataactacttttctcataatgagaaaacaagatggtatttgtgtacacaaatacacaccttgcttattgcttttcagcaatacaaatataataaatttttaaaatagttgcggcgaagccgcatttttcctgtcgggaaaaaaagtcgagttcggatcggagtggatcatagcaagtattcttacattgctaaatgaaaatctcagttaacaaccttgataaacaaaagatttcaagtatccattttctcagacaaaacctctcccctcctatctatctaacaacattcaaaat

SEQ ID NO: 493 - DNA, 3155 bp, Butyricimonas faecihominis
gtattattaatataacgagaatgtacatctaatgaatactttactattggcattgttgtcaattcccgaaacctctctgccaaagcataatttgccttttgctgggcatttatcgatcctacaaacaccaaaaataataggactaaaaactttttcatacacgattatttacatacaaacatccaaccttttacatcaaaaaattcggggggcccaagcccccccttgcacacaacaatatcacattttaaaagtatccgtacttaacgtcaccccaactgctatacttaaaaataacatctacaatcttaccaagatcatgtgcttcaaacaatggagtagtctttgtcatatcattatcatcaatctcaaatatgtacaaatcaccattttccaaacctaccgcaacatgggcattagcttcatgccgatagggattgaaatctttaaaagcaatagaagtaatcttatgatcaaaagtcttaacaaccccctctttaaagttatcacggtaatactcatgaaaataaagcgtattaccagaagcgatcagcatatagtctcggtaaggaagcacggccatatctacaaaatcagtaaacatactagccgacatctcgtgaattttactttccaatacctcgactgaacggctccctcttcttccagaaggatacgtctgataattattcatcaaatatttcccatgttgcttaataatcgtcacatatgaatctgaatggtgaaaacctgaaccaaccacttcaccttctatattttgaaataatgacatatccacatcattctctgccgtaaagaaaggagctaactctgcattataataaaaatcacccgtgggacgtgattccttttcccaaatcccgtacaatgtattgtcctcatccaaagccaataaataaggagtctgcgggtaaattgagggtgttatagatttaaacttcttcccatcaaaaagaggaagatccgaataagtcccaacatgataggcctctaaatcataattctttttgtacaaaatcgtaccatccgcattcaataaatatcctccagaggcagattgtgttgcatctacaacattaaaattagccgggatcccaaccaaaaattcatcggcaacaaaaacctctttttccattgaaaatccatgtaattccaacggctgatcttgttgtaataccataacttccccagggattgtagcataatcatcctgcacgtagtgctccacaagcttccgaggccctgaacccaaggcctgtccattattgtgcaatggataaatatcctttctcaccccaatataagtcaaatactctacatcatcttctgtctcttcctttttacccatcacgattgacaatactgatttgttcccctcgtcagacaacaccatccaccctgtttcatattgggattgtacggtaatcctgatcaatttattaaaatgcatacccgactttttatctatcggacaaaacgttacattatgagtcgctatatgattagacataaatgtgtatgtaggctccgttgacacaagctctgttcccacataccattcaaactccatctccggattaatactatcaacggtaaatacaactttgggagccagtacaatttcttccccggcgtaaacggtatatttctcttctatattctcccatcttttaacttcatttatctccttgaaatcctcatccaatttgttatccaaacaacttgtaagagcaagcaaggcagctattattaataaatactttttcataaattccatatattattttatccaataacaggtacagtcacctcatctccattttcatctataaaaggaccgtatttctccaaatatcttttcagggttaaagcacaccgacgaatcacatctgagtcgtcaagcgtaatctccggaattcccccgttagcctcaatcagcaactcaaactttttaatggtaaattctcctaaatttgcccaaatcacccattcatcttcattccaccattccggtctagaagcaatatctgaaattgatataactgccgtacggaaaggcgtatctccttgactatatttttcactatcagcaattctaaacacgacacgtcgaatctccgaagataaaatctcactattcttgaacgtaatataaatcgtatccgctactcgatctttatgaaacacgaaatcttccgatatatcataatttgcggcatccaatgtcgtttcctcttttactacttccaacttaaaagaacaatcttcatcaaacattctaccggaaagattcatggcaacaggtactgaaatatcaccttccggatagaaaaagaaagaggtagaagtactgtcattggtagcgttctttgtaaaatagatataagaaacgtcattcgaattttctaaaattcccctttcgtcacaagcataaagtaacaccaaggatacaaagactaatatatactttttcataatctcaacaattaaatgttctcactatccggcacatccaaaatgaaatactccggtttccaattattaacggtcggtacagactgattcagacgcttaaacataaagaatatctgaccttcgcccaaaaattcccgacgtgcatctgaaattaatctatccataaaatcagactttaatgtgattcctgataaatcaacatttctcagattacgtccctttttcacttgcatcaaataatcgattgcctctgacggatctttatcaaaacaagcctctgctgctatataatagatctcactcatacgaataatcgggatcaaattcgaactcaatattccttctgatgttgcattgttttgataagcatacttcatcaaacgattcaccgcactcaattggtatcttttacgatagtcatccgtttctccgttaaacaaattatccacctcttttactaccataaacaattgattcccattagcatcgagaacgtcattcagcgccttgtcccaatcggtcaattttgttgaataaaaaccgcacaaaatatcatcataaaatttcaaattcccgtttgccatcttacttgccgaagtaaaattataatatttcgtattattttggaaatcaataatttcctttgcgacattatatgc

SEQ ID NO: 494 - DNA, 3155 bp, Butyricimonas faecihominis
taataatcgatttatattatatatttatcttggagggaaaagtaaaaaaaatgaatattttgaagaaagtcccctttgaggggactttttcagtggcctcgtttatagaggaggtggcacgaagtgacggaggagtccgaccatgaaaacaagcattacctttacaaactgtaaagtagtatataattaccttatatttataccccacgttaagagccaacggttcggaagttgcagaaagagttcccccgaccaatatatcacgtcctatatatttcaacggatactcgagataaattttttgccccactttatgaattgtcaagaaatcacctttagcagttacaattcctgaagatttcatcaatacctcgtacttgtctttcttcttcttaacaggtggttttacctcttctgtttctgcttttttcttctttttcttaaacaattccccgacataactctcaccagcaagaggaactaataacactaacaacaataatgatacaaataaatttttcattttaaatgatttaaaattaagcatagctaatacatcctcgaacattttacttcttatatagtataaattacttattccaccgctaattttggaacatctctcgaaaactctccttgcgaggagcaacaaaccacgccgaacgcaaacggccatccgggttcacaaaaatataacgcagcaaagtttcgatcacataatctttagcaaagaagcgtatggataaatcgcaaaacaaatttaacatccagttcgtctgcttcttttccttcaaaatcaccctacacctctcttgatctttctccctccccggctatattcacgtacacgattccattttctccccagttattcttcacctccttcgctccggcaaacacatccagttcgtttaccccattcacgctatccaaagaccacacgcaaataaacacattttgctctcgaaaatctctcaagcgaaacattttcccttcgttatccggcaacactatatcaagagatagtacatcctgtcgaacaggcatatacctcttttccagctcgttcactcactccacggttcctgggtttttggaacaacacttgaaaacctcgaacacagaatccatattcttccctataccattctctcgtaactcacgctctaacaaacctaaagcataaagattacgtaccttctcgctcttaatcccgtacaaacattcctttatacgccaatacgtgtcaggatacttattcacataaaaataccaatccaacacgtaattcaaatctgtttctgtcaacaactccattttccggaacgtccagatcacaacttaactgacatgaacaaaattttatagcttcttcagttttaccttctgtctctaaagtttccgcctttttaacaaactcatcgaatttggttttacggttcttctttagctttctttacagcctccttctttgctaattcagctttaccattagctgcagcctctgcaaattgtaattcataccttttcatgttattaaacaatccattagcttgggggattccttggcttaacacttgaataaaattagcatctaactcagatgcagttccagtaagtacaacaggagggattaaaacttgtacatcgtcctttagaccattctttttgggaagtacggtaacagctaacttgctgtcaatagtctttcttatcgtaatgacaagatcaacgccatcaattaatttcaataaatcattaaacatatcattgccatttctttatcctagctggctcgctaggggatttgttattattacaatacaaacataggtatttactttgatataacaaaatacacacctatcactttcacattattacacttattttcagtcacttaactcgcacacattcccctccccgactggttctattagtaaaggaaaataaccgaagtattatcaccaccatattgatagaaagaccacctcgtgaaaaattcttcaagaattaccttttcctctttttccttctgggttcatcgtcatcatcatctccttttttcttctttttctttaggaaatgtggctcatattcattttttgaattaagcactccaagtacaaaactagagggcatattgtataaattctcacttgctgttcgctcaatattttcagcctgatccaaatggtaacgttcgacaaattcagccgttaaaaacgggcgaacccggttaatatcaattccatctgagataaatgcaggtttatcatagatacaattctttacaagtgcaagttcataagagttcaacacaggaagttcctctcccctacttgatttttcaggagcatttaaagggtttaagaattccttgtgtacttcatggatcattgaatcgacagaatttcctattttcacgatatttgtatggtccacgagaatattgaacaacgagaaaaagtactcccggagagctgccgaaagatgcagtttattcgtgtagtctataagcttgttcacaaattcaatattcttttcatgctctttctgctctattttagcgatatccttcaacttataactacagaaagaattatacaggagatctaattgagcctgattcaaatgcgtattttgtgagtccaaataactccggaattcttttagtacattaggatctttcagcatcgtactttcgtggaatatctgtttagattttctaaactcagtagcacttttaattagatttttaaaatactccttctttattgtttccgcttgtataaaacgttttacgagtccaagttctgataatgatattatagtcttactattaccatcgaaacaacgccattcatccaataaaaagatattatcctctttgagagctctttcgagatccgccacattaataaataaataccggtcaagtaattttttccctacctctttaaaggaaacatcaagattagatttttcctccttatttcttgtcagaacctgatccaactcctgtgatgaataatttaattttaattgtgaaggagttccacttactccaataaatttacgagttgccggatcatgaaaagaaaatttataatacacgttcccatctcttgtattatttttgaaacaagtaatat

SEQ ID NO: 495 - DNA, 3154 bp, Butyricimonas faecihominis
tatttatcctatgcaaggtatgattcggtacttggaaagtatgtggctgatcgatttattgcacaacaagaattttatgtacctagagaatggtaaaatacgatttaatatttaaggtgatgaaaatagtattgcaaaaatggctgtgtgtaatgctgttagtggcgagtatgtccgcttgtgctttgcaacagagaaaaccgataatgaaggaacgacctggagtcgtgagacaaatggtggagaatcgtgattttaaggtggatttttcagccacacctggaggcggtggctggtcatttcttggtgcggaaatcccattttatatgcagatatctggtgatatacttcattctttcatgagttatgatatttggacacgaccgggtttggaatacgtgtacgccagaccttataaacatggcgaaccttttccgtccaagtatattatttcagattacgaggttacaattgggactaaagattcgattatcataagatttactttccggatgtcattgaatatgaatggagatgatatcattgttccccgtacgtcttggtattccgagttcgaggatcgtgttgattatgaggtggaacaagttcccgtgtgttgtaaaatggttgttgttcgtaatggggatgtagttgtttattttgccagagagaaagaccggaaaacatttgtggtctatagagggcattttgtttttaatcggacaaaagaagcgtcatgatgaaaatggagatcgttgatgtcgtctgtatttgtactatttatctgtcttttatatgtttttgtgatgaagatattagttttaataacgttttacacgtgctgtttcgttagtacggtgtatgggggaggatttgcccagttgattatcgggagcgataccttgaggatatatccttgcccggttgaacaggatagtgttctggaatggcaaatacagaaacgtttggttgaagacacttcttctgtcgagtattggaaggattatgttagtttgtggcggttggaagaaggaatgcttttcttggagaaaattgaaaaagacaaccagactgtggacatttccggtattttcgatgtttatcgtgaaaacggacgcattgttgcccgatggtttagtggcgagcttcttgcggtggggggtgaaggtttttatccttatcgaatttacacgacctcaatattgtgtggccctaagcctccaagatttgaaacggaaatcacatatacatttcgagatggggagatgacggatcggaaagaggtgcgtaaccgtttgcgggagcaaggaaatcagatgtgtcactacacgatgggaatgttgttgaatattaaggaaatgacgcagaatagaggggtggattttgatgtgtatatttatcctaagtccgacgggagggtggattgggtagaggtcatgtgtcggaaagagaaattggcaccagatgatcctgctactcgtgaagcctatgcgtgtgccgaattgataggagactggcgtgtggtgaccttggatggtgaaattcagagggtgttggtggatcctgtggcaaggaaatacaggttagagatggacacgtatttgtcgagagcttatccggatgtgttggagatggatggtatgctttatcgaatggatgctttccccttgcattacgattcagaggtattttctcgtgtacgttcttatctgaaaggggctttcacgacggaatgtccttgggggtatcatgcccgctggaagattgccgaagaaaaattgtggttgacagaggttcgtaatgcttatactggggaattgatacctctttcggtggttgcgcccggtaatgaaggagaggcggtggaggcatcatggtatactggggttttcaagatggggatgggcggctcgttggattctttgtggtatgacattgaagggcgtgaaatggtgagtggtgatcctgtcaggaaatatattgatcgtgaagaaatcgtgtgcgaggtggagcaaggttacgtagtccgtcaggagattcgaaataatttcacacgccggggagatacggtggcttatcgtcgttttgtggaaacactacgtgcgcacgattgggatcgttatccggagttgaaagatcgcaatttgtattgttcttttacggtttacccgcgtatggatggtcgtgcagatcggattgggtgtatccggcttgttacgacttgtgacttggatcgaaaacgcggtgacgaacgggaagacgtgaaaacagctcgtccgtggatggagttcattcgtcatgcagcggaatccatccctttttgggatgtgcgttactttaggggaaaggtggaatcacaagaggtttgtcttgatataaggaaaacaacatttgactttaatcgagaaagaatgtatgtttatcgggaggatcggggatatgagacggaaaagtttattgtagtcgaacaggatgataggaacgttcggatttttcctaaaaattattattcgataagggattcgttgaacaagagtatgtttgggtgggtggatttgttggctgttccctttgatgaaggtgaagagacgattcgggagaatcatccgtggaaccggtgggaaaaggagatggagaagcgggttttcggaggtggtgtgaatcgtatcgcaaaagcggtagcggattctttatcaactgacataatgatagatgtcaatatctattttgatcgagagggacgactgatcgtgtcttcgatggaaatgtccaggcctttgtttgaagtcttgccgcatgccttgtgggaacggatgttttacgagagcatgggtggggattatggccggaagattcttgaaaaggtgatgaactccatctccctgcagggtttgaatgatgaatatcttgaatcgttgagaaaaatagaaaagaaagcgttggagtacagagagaatatagcatccggggatacggtggctcagcgtgagttgcaggatgcttttatgtttgtaaggaaaagtcgaccgaaagcaaattatggtcgggtgtgtatttctaagcgttattatgggaaagagtaatacgatgatgattgatgtgcgaggtaacgtatttgacagaggataaaataaattttaaatcatatattatg

SEQ ID NO: 496 - DNA, 3135 bp, Butyricimonas faecihominis
caatttaaggatcataaggtagaagctttggcaggtatttccacgcagatggatgaggaacatgtcgttggaggaatcgctaaaggggggcctaataatcaggtacattatgctaaaaacaaatggccggcgattgacaatagtggctcaacacctcaagcattgcaagcgtatagctctaattatgaaaaagacgtgatggtgagtttcttgggaagattgacttatagttacaagcaaaaatatatttttggggcttccgttcgtcgggatggtagttcaaagttcgggaaaggaaaaccttggggaactttcccggcggttagtgcggcttgggtgttctctgacgagtcatttatggattggtgtgattggttggattttggaaaaattcgtggtagctggggagagactggaactcaatttacaactcgttatttagcttatggttctttgacaacaggctggacgtttatgggaaattccacgatcgtaccggaagcggccaatggtttgttgaatcccaacttgtcttgggaaacaaccgggcagtataatattggagtggatctggatttcttgaattaccggctgaatgtggtattcgattattataatcgttataccgatgatatgatgtatgcggtcccgctgccgggaaactattctcccatgacaacacaataccagaatgcgggggctatttccaataatggggtggaattatcgttgagatatgacatctttagaagagataatttccgttggaggttgaatttcaatattgcccggaactggaataaattcaaaaaaagccataatggccgggatttagggacctatatcattggtgagccattaaatattattcggagattgaagacgcaaggcgttatcgagtccgaggatcagattccgtataaatataatgcttacggtgaaaaacaatatttacatccggatatgtatgaaggggaacgccagttctacacggtaggagatatgtattattatgatgcgaatggagatggtttgattaatcccgcttctgatgctatctatgtggggagtcctctcccggaggcccaagggggtattatgacagaattgcaatggaaaggttttgatttatccatgaattttacttattctttggggcgtacgatcatcaatgccgggaaggcagaagctattgcggtgaatagttccacgttagacggtcctattttggaggatattcgtaaatatacattctgggaaaaaaccggggataaagcggactttcccagattatcttatgatgttggaaaaaataacacgggaatttacagtgatcagttcgtggaggatgtgaattatcttcggatgaagagttttgttctgggttatactctaccgaagaaagttacggatcgtatgcgtttacaaaaagttcgagcctatatcagcggggagaatttatttacttggactaattattccggaatggaccccgaggccgttgacttgatgactggatttgataatgttcgaaaatatccgttgaatcggaagtttactttaggtttgtcaattaacttttaatagaagctatgatgaagaggtttacaattatactatttctgccggtgatcatgatgttacattcctcgtgtaacgggttaatggatatagagccggagaattcaatgacttactataattttttcaagacggaacaggattttgaggggattatgcggggtgcttatgaaacttatcgcagtgcttacgagtattccacgcctcgtgctatttccggggaaattatggacgagtgtgatcaatatctgacaaaggcattaagaatactggatgcaacaacaattaatagtgacgtgactgcctgttcttggtatagttactatcaagcaattacacaggcaatgatggtgatcgagaacattgataaagctgatttacccaaggagagacatgattactggttgggacaagcgctattttataaagctttatgctatttcgagatcgttcgggattggggagattgtccatacgttgcgacttcttacaaggtcgaacctttagctcgtaagccgtggaatgagattttggatattgctatttctgatatgaaacaggctactactttgctcgatgtttggaataacttgacagatgccagcgggaataaggtaacaacgaaacaaatccccgggaaagaagcggcttacgccatgttagcacacatgtacgcgtgggaagggagtctgttaaataataacgacaccttgcaaaaggcgatagatgcggcaacttgggttatcgagaaaggtggattcacgttggcggccgatccggaagaggtatgcacgaagttgctattaggtaagcatcccgaatctatttttgaactggaagtggtgtacacggacttgttgtggatggatgtttacattgacgaggaattgtattaccagagttacccgatagagcctaattcggagccgggagatattgcttggaaagatatgaaaattaaagcggagagtgtgttgaaaatgtacaaagagggagataaacgaagagatgcttatttctacaaaccggctgaaatgattgatgttgaagaaaccgagggatgggctcttatgcagcgtagaagggatatagttgaagataaaacatggtcatctccttccatgtggttccagaattttgcaggaaacgttatacgtacccgtttggccgatattcttttgctgcgggcggaatgttacgccaagttaggaaaagatgatctggcaaaatctgacttggatcgggtaagagaccgggctggggcagcaagatataccgcggcagaaggacctatttatagagccgtttttgaagaaagggagaaagaattacttcttgagcgtcatcgttggtatgatatggtacgtacgggatactggaaaacggatatgaccgaggaatatgcaaaactaacggatcaagatgttgaggacggggcgttgtacctacctgttcattatagtgcattcaattccaataaattaatgcgtcaaactagatattggttaaagagacaataaaatgtgaaagctatgaataagatatttataatac

SEQ ID NO: 497 - DNA, 3135 bp, Butyricimonas faecihominis
tttatgaaccttattatatataaggttcatataaggtttctataaggtatctataaggttcatgacggtattcgtccggaacagatctattcattattatgaaatatgccattgcttggtcgctgactcccatcgtcttaggcttgttctgcttggattgtcgggttgaacgggcggggaacttggacgattgtgaaaatagaggcgtagctgtttttgggaggttaactgatatatcgccagttgattttagttttgaaaagacgttttacttgggtggcaaaggtttgattctcttctttttgtaggagaggatcgtcttccagaatgagcgtggcagcttgggcagcctcgttcaggatgcggccgtctttccctaggttggctacccgcaggttgcaagttagcccgctttgttgtgttccttcgatgtctcccggaccgcgtagttttaaatcgacttcggcaatctcaaagccatcattcgtggaggtcatggtctcgatccttttacgggactcgttagacagtttgtaggaggtcatcaggatacaatacgattgttcggctccccgtccgacacgcccgcgcagctggtgcaattgggatagtccgaaacgttcggcactttcaatgaccatgatagaggcgttgggaacatttaccccgacttcgatcacggtggttgccacaagaatacgggtttctcccgatacgaaacgcctcatgtgttcctctttctctgtcggtttgagtttcccgtgaacgatgtccgccgtgtatcccaagggggcgaaataactcatcacgtgttcatagccctcttccaagttccggtaatccatcttttccgattcggagatcatggggtacacgatgtaggcctgcctgccgagttccagttctttctggatgaatttatagacttgcaggcgtcttgcctcgaatgcatgatgtgtggtgataggtttccggccgggaggaagttggtcgatcaccgatacatctagatcaccgtagagggtcatggcgagagtccggggaatgggagtggccgtcatgaccagcatgtgtgggggaatcgtgttcttttgccacagtttagctcgctgggcaactccgaaacgatgctgctcgtcgataacgacaagtcccacgtttttaaaattcaccacgtcttccagtagggcgtgtgtcccgatcaggatttgcagacgtccgtcggacagggcctcgtgaatgatttccctttcttttttcttggtggaacctgtgagtaggccgacgctaatcggggtatccttcagaagcccggatatggtttcgtaatgttgggtggcgagaatctccgtcggggccatgatggcggcttggtaaccgttgtcgagggcgatcagcatacacatcacggcgacaagggttttgccgcttcccacgtctccctgcaacaggcggttcatttgcttgccggaaccgcaatcggaacggatttctttaataacccgtttctgcgcgtcggtcaagggaaagggtaggtgattgtggtagaaatcgttgaaataatccccgaccgtggtaaagagatggccttggaaggctgccttgcggttgaatttcagtttcagtatgttgagctgaatgtagaacagctcttcaaatttaagccggtattgtgccttgcggagcatatccgggttttccgggaagtggatgttgtacaaagcctcgtgcaggtagatcaagttgtgttttttgatgaaccatgccgggagggtttcttgaatcctgccgttgatagctttgaaaatatttgcttgtatcttgttgatcagccgggaggtcaggtaactttttttcatcttctccgtggtcgggtagatggcttggaaacccacgagttgcttggcactcgtttcgtacaggtccatttccgggtggacgatgttcatcttgtggttgaagatggtgggcttgccgaaaattaggtactccttgtcaggggtgatctggctggagaggtatttgtggcccgtgaaccacacgagttccaattccccggttccgtcgtaggccgtggcgaccatgcgcatctgtttgcccgcgccgacggacgtgaggttcgtgattttagcttttacctgaatgtaggggaggtctgatgtaagttcccggatcgtgtagacacgggtccggtcaatgtatttgtaggggatgtaatagagcatatcctcgtagctttggatgcccatttcctgctccagcaacgaggctcttttctctccaacacccggtacgaattttatgttcagtcctgccagttccaaaatacaagttttcgatggttcatttctcgaacgaaagtaaaaaaaatagatgactttagttgagcatatcgggaataaattttaatttcgtggaataaataatttggacagacagtttaccgggagatgtataattatttaaaacaacgatttaaacatgccattcgttttcgacataaaaggggatacggggtacattccccgttcgtttttgatttgatcacgaatgtaataaaggaaaaagcgatctattacgatttcgagcggattgaatcgaagggaaatattcgggagaaagagcggaagttgtatcgtttactttttcggttggcagaatatttttcttaccggaacgtgctgtgtgtcggggtgcggtcgccgtgggcttccatgtacctggcggctgtttcgaaacagatggtgttgttgaacgggggacgtgcatgtccgggagccgaatatacggaacaggtgaaaccgggagatttgaaaggtcgcgagatcgatatggttttcttggggagagcgttcgaggaggattgggatgaaacttgggaagaggttttgcgagtgcgcaggcgaggcccgctatgcatcgtgattaaagatatttacaagggacgcttcaattctttggcatggagacaattgaggcaggagggaacggtttcgatcgacatgatgtggtatgggatcgtgttctttgacacgagattgcagaagggaaagtataatgtaataatttaaaagattttgtgattgccgattgaatgattaggtgattaaaaaaagagcgtgttaggttgtgggg

SEQ ID NO: 498 - DNA, 3113 bp, Butyricimonas faecihominis
tgcttatattgttaaaattgactttatttgaaaattagaattattctaaataatgacttttgaagtctgaattttgttaacataaaagacaaggcttaagaatcaaaaaaatatagcgtagttcattttttccccttaggtgctaaagctttatccctagggtaggttaattagaaagttacgtttatgttaagaatttgttgcaaaaaaggaacgcttggaaatagattgatttgggattaaggtgttgattttcatgattgtatgtctaaagaattgatatctaaaacgtaagcaagaatcgataaaaaacaagtgaaagtatcattttttttccaagattttttttcgaatttagcattccatttcctagaaatgagatagggatataaataatagataaatgaaaagggattgtaaaagtgtttggtcggaatgtctagacttaatcaaggagcaggtgttgccaagaacgtttaaaacttggtttgcaccgattcgtgcattgagtttcaaagatgatgtgttgacaattcaggtgccgagtcaatatgtttatgaatgtttggaagagcattttgtggatatattgagaaaggctgttcgtaccgctattggtccgaatgcaaaacttgaatattcggttatagtagaagagagccatcctcgtgaccctctctccgtaacgatgccttccaataacatgaaaaaggtggaaccaaacacggtatacgtgaatggtaaaccggatagtgttgcccctaaaaatccttttgagcgtaataataatcgtttgcagatagaccctcaattgaatccttcttacacgttggacagttatatcgagggaagttgtaatcgtttggcaaagtctgctgccgtggctattgcacaaaatccgggaggtacggcttttaatcccttgttaatatatggtggatccggattggggaaaactcatttggctcaagctatcggtatggaggtaaaacaaaattatcccaacaaggtcgtgttgtacgtgaccacgaatgttttccagactcaatttacggaagccgtacgcaaaaatgagataaatgatttcttacatttctatcagttaattgacgtgttgattctggatgatattcatgagttggccggaaagactgccacgcagaatacattcttccatatatttaatcacttgcatcaatcgggaaaacaattgatcttgacatccgatcgttcaccggctgaattgagtggtttggaagaacgtttactttcccgtttccgttggggattgtctgccgagataaaagctcctgattttgagactcgtatggaaattgctcgttttaaggcgcataaagatggtattgacttctcggatgaggtattggaatatatctgtaaatatgtaagtaataacgtgcgggaattggaaggagcaatgatttctttgctggcccaggctacatttaaccataaagatctgacggttgatgtggtaaaggatattttgggtaaaatggtgaagaatcagaaagtcgagttgaccgtggaacatattcagcaggttgtttgtaatcattttaacatggctcccgaaatgttacaagagaagacgagaaaacgggaagttgttcaggctcgtcagctggccatgtatttcagcaagacttacacgaatgcatcgttggcatacattggtaaacaaattggtaagaaggatcacacaaccgtgttgtatgcttgtaaggctgttaccgatttgatggagaccgatcgtgcttttaaggctcaagtggaggaactccaaaagaaactttattgccgtaactaattatcacgttcctttatggaggaggataaatatagaaccgtaaatgcgattgccgaaggcctgtacaaggaaaaaggtagtcgctttatttcttttatttatcccgtaaaatccgaagaagagattaaagatattgttaccgggcttaagacgaagtattatgatgcccgacaccattgttatgcttattgcctaggggcaaaccgggagcgtttccgggcgaatgatgacggggagccttcttctacggcgggtaaacccatcctcggacagattatttccaatgacttgtccaacgtgcttatcgtggtgatccggtatttcgggggaattaagttaggggtatccggtttgattcaagcctataaagaagctgccgccgatgcgatcaatcatgcagagatcgtggagcgtacggtagatgaagttattcacgtgcgttttacttatgtcgtgatgaatgacgtgatgaaagtattgaaagaagaagaaccggacattttatcccgaaattttgagatggaatgtgagatgactttgtctatcagacagaaagatatgcctcgtcttagagaacgtttgttgaagatcgagtctttgagtatcgaagaatagcgaatttcatttgcccctccctttgggagtatacattggtgtataaaaaaggatccgctataattcgtttattatagcggattgtcattcagattgtgatccagctgggactcgaacccaggaccccaacattaaaagtgttgtgctctaccggctgagctactgaatccttcaattgtgtttctcaattgcggttgcaaagataggtattctattcgaatttccaaaggacaaaaggattttttacaaaaaaaagacaagataaaaagaatactttagcccccatggatgctctttttatcgtgatatacccggaatgccccgttaagacttttgatatatttcttttgaattcggagcatctatcatttggccgcttatggttatcttgcgggctacactttgtccgccgatgggttgggacaagaacacgttattttcactgtaggtacatagcaagtacactggagattgttcttgctatgttcttgctatgttcctgcttggtatttgtcatagcccatcgctagcctaaccccggtgtattgtcctgaaaaaagtttacagtaaacttagtaaaccaatgtcagaattaaattttccccctgttcgtcgtcgttattacgccgtgaagacgaaattatcagcggtacgagatcgaataatc

SEQ ID NO: 499 - DNA, 3094 bp, Butyricimonas faecihominis
atttctattactataaataatagcaagataacctactacaacagcaaaaattccactactataacttcccccaaaatttaaccacgagtcatttgaaagatttgttttaataacattaccatatgccaacaacgtattaatgataaatgcaatagcaattccactaattatgattcccaaaacaacatataaatcttttttttcatcaattcatatttattacaacgattcactaacttttttaatcgccttataaatctcactataagaatctctacctttatatttttcggccagttcacatgctttatccatttttgagcctgcaagtatttctttaacccatttatccttctcaaggtatttccgagttttatcatatgttggcagatattgctttaatgctctttctgttgctgctgaatcttggaaatgtcgacatgtatcttcaaaatgtagtaaaaaccaatattctattgactgtaagctatcacaaagaatcacattagcattattttcatatttctttttgagcgataccatttttttattctctgcatcagaacgcctgctaacatcagcatcaaaaacacatattacaaagacatcttcatccagaagttcctttattttcttttctattttctcaatactattgttttcaaataaacgaggagaaatagagtatctataaccaagtatttttttcaaatgactgaaatagaataattcagtcaaaccctcaccgacgatatgaataatctgtctggtcgctgtattttttcttgcttttctcataaaaatacacgattatagattaggaactgcaccgaatttaccgaacttatatgccttttggaaagaactgatcctattcaatcccttgaagtctgtcagaggatacagtacacttgaaccatccagattcttttcagtaaaccaaacattatcttttctaagcaaatcttcctctcctaacagtccatcataatgcgttgtgagcaacaactgtgcctgttctgattcttttagaaaacgttcaatgatgtattctatcaattttggatgaagagaagattcaatctcgtcaactgcgagaaaagcatctttttcaagaatcttttgtacttgagcagccaagccaaatgtacgaatagtgccgtccgattcaaacagttccaagaactcataataatcattgttaccataatcagatgaaactttatgctgatacatagtataattaatcggccccttatgcgtttcctgttctttggaagtaatatttgaaatattaaaatctgcttcctgcagatatctcaaaatataatcttttgctgactcattcttgattgattcttcggcataacgacctaaagatgatgcaggtacaatagccggcataacctgattggttagatactgaagaaccgtctctagttctacaatatgtgtattcacctgcatataggcagcaaaaactgacatattatgcaaacacttcaatgttatttcctctttgacagcttgcgacatcttgattttctgtccaaatttaataacagatacgttattctcagtatttctttcaaatatagtagcaggctgttgacttggataataaattaaactttcctttgctacgtgccatctatctaaagctactgaatagacataacaaacaactttctcctcattcttcaaatagaacgaaatcgaatattcagataactgctttgaacttgttttattcaggagaaacgggactacttgaatttgttctgccttattaagtggagtataagtaatgaatgacttgataaaatcacaaaccttaataatattactcttacccgaagcatttgctccataaataacagccactttcaatagtctcacaccgccacccaattcaacaacatgatatgattccatatccttacttctatcagcttcaaaacttaatatagcctcgtctctaaatgagaacatgttcttaaatctaatttctgctatcatacaatttgtttttccacaaatatataactaaatatccatatccacaaataagattaatctatttgcatcatttctacaaatatcacaaactaatacctattctattatttttttataaccttaggcaatatcaatcatttaaaaatcttggatcacaacaaggaaaaggtaagtatacctacagaagaaaccatgaagataactatctatgtacagaagcagaaataagacgtatgtttgctgatgctaatcaccacagagattctaatgtaaggtggacacaccgtatctatgggaagcaaacctctatcatttctatataaaagtatataatagattgatacaggttttaccacatcctattatgataaaagatggtatacaacaagaagaaacacctgctcatgatgctatacgagaagcactaataaattgtataattcggcactatagaatattttgtgtaaatggaaaatacgggattcaaattatgaaccaatttatgcttatatttgaaaacagaatccagatataagagaacttacaagtgaatcctgtttccatttacacaaaattccagacagtgtctatttccgtgataaaagtgggtatcagatgtaaagaacaccttgctgccatcaaatttataatttatttcttctcaatttatgtgcatcactgcacgttaataatcaagttatcaatcacccatcaaacggaaatgacagagaagtatcacaaaagtaactgccataaatgggtataaaacaaaatagttgaaaagtttgctaaagactctccagccattcagtctctattctagatcaaagtatagtaaaatgtactttattatgttcgctggaaagtatttacaatacgagattcaataccggagacatgaacattcaacacacattccgagcgtttattaccctaaattgtggtgattgatagtatgcccatccaaattctctgcattgttagttttatgttatttcaaaatcagtgcaaaattagtaaataaacttcatataccgcatgacagaacaagaaactgagtctatatgaatataga

SEQ ID NO: 500 - DNA, 3080 bp, Butyricimonas faecihominis
tttcatacgtttgcgtagattttaactattttttcctatttatatattcaagaaaaaaaattatctttgcatccctaagatgaaattttgagaaaagaatgatctataaacaatcactcctgaatgtcaggaggtaaacgcaaaaatctaacagaattatgagtacgaagtacgtttacacctttggtgacggaaaagcagaaggaaaagcagacatgagaaacctgctaggaggcaaaggcgccaatcttgccgaaatgaatctcatcggagttcctgtacctgcaggttttactatcacaacagaagtttgtaccctttataatcaagaaggaaaagacgctgtcataaaactaatcgagaatgatgttaaagccggtatcgcagctacagaaaagttaatgaatgccaaattcggatcaaaaggagaggctttccctcttttagtttccgtgcgttccggagccagggtgtccatgccgggtatgatggataccgtgttgaacttgggaatgaatgatgatgccgttaaaatcgtggctgaaaaatcaggtaacgccagatttgcatgggattcataccgtcgtttcgtacaaatgtatggagatgtcgtgatgggcgttgcagccggaaaaggcgaacacaacccgttcgaagttgaaatcgacaaattaaaagcagaaaaaaatatttctaacgacaccgaattctcggctgaagacctgcaagaacttgttcgtcgtttcaaaattgtcgttaaaaccaaaaccggtaaagatttcccgacctgcccgtgggagcaattatggggagccatctgcgccgtgttcgattcatggatgacggagcgtgccgttctgtaccgccagttgaatcaaatccctgaagaatggggaacagcggtaaatgttcaagccatggtttacggaaacatgggtaacaattctgcgaccggagttgctttcacgcgtgatgccgctaccggtgaagatattttcaacggagaatacctgatcaacgcgcaaggagaggacgttgttgccggaatccgcaccccgcaggagattaccatcgagggatcgcgccgttgggctaaaatgcaaaatatctcagaagaagagcgtgccgctaaatatccttcactggaagaatccatgccagccgcctacgctgaattaaatgccgttcaacaaaaactggaagactatttccacgatatgcaagaccttgaatttaccatccaagacggtaaattatggatgttgcaaacccgtaacggaaaacgtaccggtacggctatggtaaaaatggcggttgacatgctcgaacaaggcatgatcaatgaagaaaccgctatacttcgcttggaagcggctaaactggatgaattacttcacccggtattcgacaaagaatcacaatccaaagcaaaagtattaaccaaaggtttaccggcatccccgggagccgcttgcggacgtgtcgtattctttgctgacgaggcggaagaatggaaaaacagaggcgagcaagtagtattagtccgtttggaaacttctcccgaagatttacgcggaatgaacgtttccgaaggtatccttaccgcacgggggggtatgacctctcatgcggctgttgttgcccgcggtatgggtaaatgctgtgtttccggagccggagaaatcgttgttgattaccacaaacgttccttcacagtgaaaggtgttaccatcaatgaaggcgactggatttctttgaacggttctaccggagaagtttacttgggtaaagtagccaccaccgaggcgtcactggaccatgacttcagaactatcatggatttggccgagaaacatactcgcatgtacgtgagaaccaatgcagacacacctcgtgatgccaaagtagcacgtgatttcggtgccaagggtgttggtctttgccgcacggaacacatgttcttcgaaggcgaccgtatcgacgccatgcgtgaaatgatcctgtctgataccgttgaacaacgccgtatcgctttgtcaaaaatccttccgatgcaaagaagtgacttcgagggaatccttgaggctatggacggattcggagttaccatccgtttattagacccgccattacatgaatttaccccgaacgagccggaatctcaaaaatatatggctgaaaaaatgggtatttcagtagaagttgtcaaagaaaaagtggatgcgttacacgaattcaacccgatgttaggtcaccgcggttgccgtttaggaatcacttacccggaaatcaccgaaatgcaagcccgtgcaatcattgaagctgcttgtaacttgaagctgaaaggctttaacccgaagccggaaatcatggttccgttggtaggtactgtgaaagaattaagacaacaagcgaacatcatccgttgcactgctgacgtggtatttgcagaaaagggcgtgaaagtagattacatggtaggaaccatgattgaaattcctcgtgccgcattaaccgcagaccaaattgcagaagttgcagaattcttctctttcggtacgaacgacttaacccagatgactttcggatattctcgcgatgacgctggtaaattcttaccggaatatatcaagaaaggtatcttgaagaccgatccgttcgccgtattggatcaagaaggcgtgggacaattagttcaaatgggagctcaaaaaggacgttcaactaacagcaagttgaaactcggaatctgtggagaacatggtggagaaccctcttccgtgatcttctgcgacaaagtgggtatggactacgtttcatgttcaccgttccgtgtacccatcgcacgtttggctgcggctcaggctgctatcatgcacaccaacaaataagacaatttttaataaataaacgaggagctgttttttaaggagacagctccttttttcatgtttgattctacacattcttctcctaaatttttcgtgcgatctcccccgaaagctatttctctttccagtaaatggtaaaaatatgttattcattcacgacacaaattcatcacccactaacgcatagag

SEQ ID NO: 501 - DNA, 3076 bp, Butyricimonas faecihominis
gttctgctatatacatggcactcaaaatggaaacccctgccccgcatccctctttcaaaggattgaatccctcaaggattgccccggctgcataaagattctcaaagattttgccttctcgggtacaacggaacatgttgtcggttttgatcccgaaagattgataaggttgtgcatcaaacacatcgctattataccattgtgttctattcggggcaaatgttacatcgagatcaaaaattggttcgtatattttttctgtactggcaatcaatccttgactgaaatagcttcctgtggcaagaataaaattttgtccaacgaaaggaatgtccccatgattgaaagagtaaatctgtgaaattctgttaccttttatatctgcgcgtaaaacattatctcccagcatgaaaacgcctccattttgctggaagacagaacgaagtttttgttgtgtatgtatacccggaacggaaggaggaagagttggcaagagatagattggcttgttgatttcttttcgcaagtaatctaccacatcttcccggttcaaccccgtgatcgcgggtaaaataattgaatcacaatctccgctttccgcttttagtatccgggctaattcttttatattttcttgcttgtcaaatacccgggcaatattaacggagcgcatctctgtcggattcttgcgcaaattttcaagagccgggaaattgatagaatgaatactgcatttggctcccatttttaggaattcatccgcaatgaatcgcatgtaaaaatcaaggaatcccgtgatgttaaaaaggcccgggtgctggattggtaaacatttttcgttttcgcttatcaataagtttttaagcgtgagccatgtgggtttcaatgtccccattggagtcactcgataatgattctcttcatgatccccttgggtagaaattcctgcattttttaaaaattcttccgcttgtcgggctaattccttaaacttgttttcgcctagtttggcataaggatgcgtgggagcttgtttgacgagttcgcttatcgcatccaatggtttttggacgcttgtcccgtcgggtaaattatttaacaaatcaaatgacccggaagaaaaatgcaaagcactttgtcccgatgatatgataacacatcgctgaccccgttgggacaaataaattccactgattaagccggataagccaccaccgatgatgattgtatcgaatttcatgttatttcttagatgatgatgttaaaccacaaacgccttcataaatccaggccgtatactcactctcgcgcaacgtgtctccccaggcaatgggtgacatccctttccatctttcgttcaagaaagaagcaagatcagccttggctctattcgtgcatactttattcatatcgctcattaaaccagccgcacgacacgcacaaagttctccttggcaggttcccataccgacgcgagttcttcgtctcaagtcaaccagattgtttacatccagctcgtttaaggcgtattttgcctcgccaacagaaacctcttcgcattcacatatcaagctattgtctaatggcgtattttcagaaaaacgatcggccatatctccatgcctgtaaatcgtcgaattgcgttgcgtaagaggtacggatatgatttttttgctgatttcttctatactctcccttgaaccaggaagcttttccgtggctgtcgtacaaatggcagaaaggttgagttttttgcatatcaaatctgttgtccactcggccattaaccggtaggtcattaatttccctcccgtgatcgtgataaatccttccaacccgtcacgggttgcatgatccaagagcacgattccccgacttacacttcggccgctaggatcgttgtcagacgcaactagcgggcgcactccggcatatgctcttaatatacgagtttgagccagaatgggtgccatcttttccccttcttgtaacagcatgtcaacctcttccggggttactttcatgtgatcaatttcttcaaaaggcactttactagatgttgttccaatgaggcagatcgtgtcgcccggaacaagaatgtcagcatcggctggtttacgacacctgttcaggacgatattgtttactcgatgtccaaaaatcagtaatgctcctttcgaaggcaacatgtttatattaatatccacaagttttgctatattatgtccccagattcctccggcattgacaacaatagtagcataataggatttgatttcgtttgttttatgatctagaacttttactccaatcacccgattttgctctcgcatgatctcgatgacttcttggtatgtgagtatcgttgctccatgtaatttggcgtccatcacgttggatgctgtcaggcgaaacgggtccacggcgccatccggtactcttaccgccccgataatatcccggtttgcagatggttctagacgtaatgcttctttcgggtcgatgatgtccgcacgaattcccgcctgcttacacgcctcgacaaatttagcctgatagctgagatcatcctcgggtaaacttaggaataaaccatctgtttcttctacacaatgactggcaattttgcggagcgtcatattctctttgatacattcttctgcggactctttgtcggtcacggcgtaacgggctccactgtgcaataagccgtgatttctccccgtggcaccggttgagatgtcgaatctttccaatagaagtgtttttatacccctgcgagagcaatctctggcagttccggcgccggtagcgccacctccgatgattatcacatcaaacgattgtgtagtttcgttctgcttcatgtgtatgaaattttatttttcaccacaaagaaatgaataaaacgaaacatatcaaaatttaaaagcaacttttttgatcaaaacgaaacaaaagaaaagtatttttatttcgaatgaaataaaataatctgaaaaaagaaatacatgaggatcttatttcaatagtttcaaaattccatattaataaagtagaagagcatgattatcat

SEQ ID NO: 502 - DNA, 3071 bp, Butyricimonas faecihominis
cattaaaatagattgattccactttttttcgtacatttgtataatactattaataccaaaaaccatgtcaagatacaatctcatccggttcgattgggccatgaaacgcttattacgtgataaagcaaatttcgtcgtattagaaggatttttgagcgaattactacaagataacatcaaaattcatcgaatcctagaaagcgaaggtaacaaagaagacgagtccgacaaattcaaccgggttgacgttttggctgaaaacaacaaaaaggaactcattatcatagaagttcaaaacacccgggaattatattattttcaacgaatgctatacggtgtctccaaagccatcacagaatacattcatgaaggtgacctttatgctgaagttcgaaaagtctattccatcaatatcgtatatttcgatttaggacaggggagcgattacatctaccgtggagtaaccgattttagaggaattcattcaggtgacaccttacgtctttcaaccaaacaacggaacacgttcgtgaaagaaaatgccggagaaatctttccggaatattacgtcctccgagttaatgaatttgatgatcgggccaaaacacctcttgacgagtgggtccgtttcttgaaatccggtatcattgacgaaaacaccacggctaaaggcttgcaagcagcaagagaacggctacgtgtgtcagacatgagcgaacaggaacgtcgtgcttatgaacgccacatggacaacatcagaatccagtgggatgtcctaaccactgcacatggggaaggatgggacgaaggaaaagccgaaggaagagctgaagggaaagctgaaggcaaggccgaaggattagctgaaggaagggaaaaaggcattcaagagggcatagaacaagagaaaaaagaaaccgccaaaaaattactcgaaaaaggtattccggtcgagaccatcatgacatgtaccggattatccttaacggaaatacaacaattacaataaacacgaaaagacacgtctttaacgccttattttgcattttacaatttaaaatttacttttgtttcgtgttactttttaatcggtacctaaatgaaagtttttaaattcgggggagcatccgtgaaagatgcagcaggggtaaaaaatctctcttcaattgttcatcaacagcagggacaacttatcgtggtcgtttcagctatgggaaaaacgactaatttgctagaaacattatgcaacgcctatttccaccgggactcgaaagtccccgccatcatgaaagaattaaaagactttcatctaaatatcgtgacctcgttgttccctttgaatgccccggtctacaagcacctagaagaattatttataaacctagaaaacatactggcaagcgaatcatcactatgctatgattacgaatacgatcgcattatctgtttcggggaactgatctccacgaccatcatttccgattacatggaaatggagggaatcgagaatcaattcattgacattcggaaatttctcaaaaccgaccaaaactatcgtaacgcgaacatagacttggaactttccgaacaactttgcaaagaagcatttgatttcaacacatcgtccacgttcgtcacccaaggctttatcgccggaacccgtaccaaccaaaccaccacgctaggacgggaaggatcggattacacggccgcccttttggctaacttgctaaatgccgagaacgtgacgatctggaaagacgtgccgggagtgatgaatgccgacccgaaagaatatgaaaaagcacaagtgatcagccggatgtcctacaaagaggccatcgagctgtcccatttcggggcaaaagtcattcatccgaaaaccataaaaccgatccagaacaaacaaatccccctctacgtgaaatccttcctgcacccggaatccgagggaaccgtgatacaagagattgacgagcatctaaagttaccccccatctacattaacaaagaaaatcaatgcttgttgaccctcaccccgagagatttctcttttatcgcggaagaaaaattaagccacatattcgccgtgctggcccaatataaattgaaactgaacctgatgcaaaactccgccatcagcttttctttctgcgtggattgcaacagcgccgtgttcaacgaatttctggatcaactccgggaagaattcgaggtacgctacaaccaagacgtgaaactcatcacgatccgccattacaacgaggaaatcatccgggagatcatcggggataccccctcgctagtcgagcaacgtagccgcacgaccgcccagttcgtgctaaggaatcatgtattacaataactcccgcggcatgaaacataaaacgctgtccatcatcattccagcctataacgaggcccgaactcttttcacgttactggaaaaagttcaccacacacgactagttgaaaatatccaaaaagaaattatcgttataaacgactgttcgaaagacgaaacggaggccgaaattcagcgtttcatggaaacgtatcccgattgcccccttcaataccacaaccaaccttacaaccaaggcaaaggagcggctctgcgggtcgggattcaaaaggccagcggggagtggaccgtcatacaggacgcggaccttgaatacgaaccagaagactttaacccgttactgacatggatgatcgaacacgacgggaaagttatctacgggtcccgctttctaaacaaagcgaacaaacactcctaccagcgattctatttcggtggcaggctattatccatcatcacgaacatcctgtacgggcaacacttgacggacgaaccgacctgttacaaaatgttcgacaccgcactacttaaatccatcccgttaaaatgcaccggattcgaattttgtccggaagtaacagccaaagtttgtcgcaagggatacaaaataaaggaattaccaatccactattacccccggagcattgacgagggtaaaaaaataaactggaaagacggggtcattggcatctggaccctaataaaa

SEQ ID NO: 503 - DNA, 3056 bp, Butyricimonas faecihominis
acattatggtgttgccggatttttttattataaaataagtattcatttttttaaattataaatcatgataattgtaccattaaaagaaggcgaaaatatcgagagagcactgaagaaattcaaaagaaaattcgaaaaaaccggcgtgattaaagagctgagagatcgtcaggctttcaccaaaccgtctattagaaatagaatggcccggatgaaggccgcctatcgtcaatctttgcaacaagcggaagaataaatcgatcactttctttgtttttccaaacaaaaaacgtaacttgcttacgttattaaaatagtagaaatgatgcagatagaattgttcttgaagtatttgagtagcgtgaaacgttattcggaaaatacgatcatcgcgtataaggcggatttgtatcagttctacgaattttgtggattggaaaggagtaatgaggatttttctcgagtgacgaccaagctcgtcagagaatgggtcgtggcagagatgaggggagacctgaggggtaacggtgccagaggaaagttaagtgccgcttccggtaagcgtaagttgagcagtgtaaaggcgttttttcgtttcctagtaaaagagaaagtgatagaggtgaatcccgccgagaatatcagcgggccgaaattgccgaaacgattaccggttttcgtgagggaagaggagatggaatgtacgctggatgacgcggaaaaaaagaaaggtttttccggattgagagatttcttgatcttgttgatggcttatgatacgggaatgaggcgttctgaaattattggattaaaggtggggaatgttgatctttcacggcgttgtattcgtgttttcgggaaaggtggaaaatggcgagaaatcccaatcatgaccgagttggtgcaggacatcgaatgttatttggatgcccggagccgcgtggtggaaggggagcatggcatgtttttcgtgaccgataagggaaagccgctttacgctaatttcgtttatcgtttggtgacgaaagaactggaatcacatacttctttagcaaaacgcagcccgcacgtgttgcgacattcttttgccacgcacctgttggataacggtgcgccgattcaaggaattaaagaattgctggggcattccaacttggcagctactcaggtgtacactcataattctgtggagaaaatgttgaagatttttaaacaagctcacccgcgagcataaattataggaggaaacgatatggacattagaattaatcctgtaggtttttcagtaaatccagtgctggaggagttcattaacaagaagttctcgaaattggagaagtatcacgacggaattatgagtatagatgttacgttgaaattggaaaaagacgatcatctggaaaataagttaaccgaggtgcatgttgatgtcaaagggcaagacgtgttcgctaaaaagaacgcgaaaacttttgaagaaacagtggacgagttgtacgatgtattgaagagacaacttgttaaagcgaaagaaaaaagagaaaattaagaaaaatgatctcatttattgtgagatatgatttttaatttgtacatttgcaagccaaattaaatgggttttctcgcacttgtctgggtaatttccaggtaaacagcgagttgcttgcatgaaattgagttattgagataaattgtttaataataaaaattgttttagagttatggctaaagaacattttgacaggtccaaaccacacgtaaatattggtactatcggtcacgttgaccacggtaaaactactttgacggctgctatcactacggtattggcaaaaaaaggtctttctgaattacgttcattcgattctatcgataacgcaccggaagaaaaagagagaggtatcaccattaacacttctcacgttgaataccagactgcaaatcgtcactatgcacacgttgactgtccgggacacgccgactatgtaaagaacatggtaactggtgctgctcagatggacggtgctatcttagtttgtgccgctactgatggtccgatgcctcagactcgtgagcacatccttttggctcgtcaggtaaacgttccgagaatcgttgtattcttgaacaaggtggatatggtggacgacccggaaatgttggagttggttgagatggaagttcgtgagttgttatcattctatcaatatgacggagataatactccggttatcttaggttctgctcttggagcattgaacggagaagcaaaatgggaagagaaagtaatggagttgatggatgcagttgacaactggattgagttgccgcaacgtgccgttgataaaccgttcttgatgcctgttgaggacgtgttctctatcactggtcgtggaactgttgctaccggtcgtatcgaaactggtatcgttcacacgggtgatgagttggaaattatcggtttgggtgctgatggtaagaaaaccgtatgtaccggagttgagatgttccgtaagattcttgacgaaggtcaagctggtgataacgttggtttgttacttcgtggtatcgacaaagacgagatcaaacgtggtatggtattggcaaaaccgggttctgttaaaccgcacgataaattcaaagctgaggtttatatcttgaagaaagaagaaggtggtcgtcacactccgttccacaacagatacagacctcaattctatatccgtaccttggacgttaccggtgagatcactcttccggaaggacgcgagatggtaatgcctggtgataacttgacaatcactgttgagttgatcactccggttgcttgtaacgtaggtttgcgtttcgctatccgtgaaggtggtagaaccgtaggtgctggtcagatcactgagatcttagactaatacaattttagatttaatgattttagattgtagattcgcaattaaaatttgaaatttaaaataatgagccggcttcggtcggcttacacacgggagtggctcagttggtagagcatcggtctccaaaaccgagggtcgggagttcga

SEQ ID NO: 504 - DNA, 3016 bp, Butyricimonas faecihominis
gactactccatttagaggttgaatattcggggttgctaatggtacgttctgttgagcattaaaagaatatatatacatggtttcgggccctacatctggaactcctgcccatgcggatttatctttccatactcgtatcttattacctcctacacaagtaaactcggagaatccgtcttgtcttgtatccaagattaggtagtctggatttcgaaaaatgatttcttcttttagatgtttacctttaattacgtgttttagaacaagttgacagcattcatcttgagataattctgaaactttttcaagattgttgtcataaagatggcgtagtatagaataacttggtggagcaagaaatgttatttctttaagagaatctacttgcccttcaaataaatttgtcaattgagctcgttcgattaattccacggttaattcccaattgtaagaatctcttcttaagaattccattattgaacaatcatggtaaggtgaagaaatgccagaattccaccattcttgttttgtatcgcaacttgtgaatgtgaataaaacacagctggatataaatatgtatagaaatgttttcattttaaattttggattttaatgttatacttttattgcctttttagccaatagctattttgtcgcattaatggattgcctctaaaatcatcttgtgatacggccatgaagaaagctccatcaatgaaatcttgatctgtggcggttaaccaccctccttgtaattcaattcgagcataaccattacgaataatatcccaatagcgtgcaccttccataagtaactccttttctcgttccttaaaaatcgtatagcgtaaatcaccaccatattcagaggcatcatataaagttgcttttgatcgatccctaactttatttaaatcttcaattgctcctgctgtataatttcctcctaatcgggtgcgacattctgctcgtaataaaataatatcggctaatcgaaaatgtatcatgttttggtcaaaatcaataaattgtccggcttgccatccttctgttcctactcgggctattcgccatttataaggataggcatatcctcctgttatttcttcgctcactttgtattgcatggaatctaatttgtaaaagaaagcattttttcgttcgtctgttcctggaaacatttctcgaacggttttggcataaattcgaaaagatttgttttttatttcaccggggttttcttctgctttgactggccaaccttggtaataatatccccagcaaaaggcttgatctcgagatgtaagttcattttcgaatccacgaaccatactttcataaatgatttccttgctgttcccaactaaggcttttgtacagatttcttcggcagaattttctaaatcatataaatctgttcgtttgataatatcagtacaagcctgttctgctgttttccataaatcaacctcatcatagttttgttgatccggttgggccatgtatttacaaccagctttccaagcacataaatgagctaatacggcatttgcggcacctttgcttggtgttgatttatattttatggcattaccgttgtaatctgtcatttgatcgaaatcgggcaatagtgagatcgctttcttagcaagatcaattgcataatcggctacttctgtccagtgcgatttggcaacagctgtaaagataacatcatcttttaaaagaatgcaatctccccatattcgtataatttgtaaataagtaaatgccttaaaaaagtaaatctgtcctttatagaagtcttttttttcttgaggcatatcgatatgatcaatataagggagagagacattagcagaagctataacttgataataaaatatccattgcatatcgggaataaaggatggatttaatgttgcaaaacctacactaggataatagtctgaatattcaccattttgacatggccaataagaaaaagctttattctgacgtattattttttctgttgcattaagagctgaaacaatgtctttctctgattggaatgcgttctcgaaagtaacagaattttcaggagttacttttagtaaatcttcgcaactggaaaaccatgcctgaagaactaatataagaatcaatttatatgttttcatcttttagaattttacggttaaacctaacgtgaatttgcgggctaaaggataataatctcggtcttctccccatctaagatcaactgtttctggatctaaaccggaataattatcccaacacattaaattctctccactgatgaaaaaacgtaattgttgtatacctaaatgatgaatccatttcttgggtaaattgtaaccaatagagagagttttccactttaaccaatttactttttccacacgttgatctacttgaggagagaataatacattatttagatctttttgtaacttgggatacatggcattattgtctccagttttttcccaaaaatttactttccttaaatcgacaagaacgggaggagtgtccatttctggatttatggttgtgacatcataactgtatgtcatgtgacgtcctaattgaaatgcaaaagatagatttatatcaaaatttctccattgaaattcactgacaatacctccgctaaattctggtaatgcgctaccacaagctaccatatctggtgctttcccatccccattaacatcgatgaatttgtagtctccaggtttaaaataggttaagggattccatcctgcaagataatgactaacccccacgttattgtagattatgggtaattcgtcttgttgatttacgtaaccatctgttttataggcataaatttgatttaaaggcttaccaataattcgcctgtaattagtttgatctttaccatcgtatgatttatcaaatcggttccagtttttagccccatttattgataatttccaatatagattatctttttgtaatatttcgtattttattaataattcaagac

SEQ ID NO: 505 - DNA, 3005 bp, Butyricimonas faecihominis
gtcgtatattgcgggtcttaattaaataaaaggattatggcggaatttgtaaactctattggtcaggtgcggggaaaattcggaaacgtggttgcctatgtgcgggctaacggtaagaattattgtaaaggtgcgagtatttctcgtaaacctagcacggagtcgcaaaagcaacaggctgcggcgtttgctgttgtggtgagtagaaagggatggatggctcgggcgattcgattgggatttccggggaatcaatacccgaaaggttttaacgggttcacgagtgcgaacgtgacaacggccgtgacggttgaaaaggttaatcccatgaaaccaatagtccgctataagaaagctattcaggaataccggggtattattgattactcgaaacttcgcgtggcggcgggtgcgcttgtcagtccggtcgttggttgtgaggtggaggccgagagccggaaggtgcatttctcgcatcaaggaatggccgtggaggcaatagattgtttttgggatgatgagatttatggcgtacttcttcacgaagcaacatattcctgtaaagtgatgcgattaggaacgcgtggggaggattggaacgagagcatggattttccggaagaggcagaaacggaggggctggttgtttatgtttttgcccgtgcggcggatgggaaggacacttctgattcggtgtgtttaaaatgcaatggataacttgaaaattaaaaaactggataaatggtaaaaaaggcggttatacaggttcgggacacgatgatccggacgttacaggaaaatggaatagactacatctgtatcacagatattgctcgtcagaagaacccggttgaacctaaagatgtggtgaagaattggatgagggtaaagaatactttggaatatcttggtctgtgggagaaattgaataatctcaattttaaaggggtcgaattcgacccccttttgaacgaggcgggaaacaatgctttcaccatgagtccgtctcgttgggtggaaacaacgggagctattggtattatcacaaaaaatggggcgggaggaggcacgtacgcccaaagggatattgcgtttaaatttgccagttgggtttccgtggaatttgaattatacttgatcaaggaattccagcgtctgaaagaacaggagcaagctcaactcggttggtcggccaaacgggaactttcaaaaatcaactaccatatccacacggatgcgattaagcaaaatctgatcccggaagagctttctccggcacgggtttctcaaatgtatgctaatgaggcagacgtactgaacgtggccatgttcgggatgacggctttcgaatggcgggaggcgcacccggatttgaagggtaatattcgggattatgccacgatcaatgagttgatctgcctctcgaacatggaaaatttgaatgccgtttttattcaggaaggtatggctcaacaagagcgtttgttgaaattgaaccggattgccatccaacaaatgcgagtgttggcggacatggacggaaggaagctgataaaataaaagtaacgcccggagattcctccgggcgttatgctttttgtttgaatttcttttagaacatatagtcccacatcggcagcaaaatcggtttctgatctaatgctttcaatgctttttctcccaagtattttttgtgaataactacccggaagatgtattcgtcaaaccatttgtcggtgaaagtgagataaccgttgtgtccggcttgcgggccccaactgttctcgaattcccattttgtgggtttgccgttcgcatcaacgtccacggcaactaatgacatggcgtgggcggaaccgctttggcgggtcaggatgcgggttttcttgtccatggagaaatctacgcccatcaatgaattgtagtcgtacatttccggatcaaggattccggtttcccggttgaaatacttgcccacgtcgctggaggtatacatggcctcgttccctttgatggatgcgatagcggcttctttgatgtcctcgtttggcaggttcaagtatacccagttgataccttcaatcgtgttccggtagttttgaatatcatatactttataatattcccgggtcgggtcgttcatgatcatgatgtaattcttcgggttataatcagcaggtgtgatctccttgtagaattgttgaggcgtgtagtttgccagttccttgatctccccgtttctgtccttgtatctccaagtgaacgtggttggcggttcacctaagcagagagccaaaatgcgataaatatctttcaaaacagatactttctctgcacgcagttctttgatttttttgccttgagcggccatttctcggatggtgtatccccctttgcggagacgttcgttgatcaatgatcccatggcactcgtgttgttcgagtgagcggtttccggcatgacttccttgggtacaacaccgtatttttctcccaagttgtaatagaggttccatacaccgccatcacccacgggagcttggaacatgaaggtcacgtcccggtcgtccatcggcttgttggccgtggcaatcatattctccaagaaaagattggatttttcgaacatatcccaaaaatagagatagttgtgagagaaatcgaatcccgtgaggttgtatttctcgatgatgctcggacgtaacacgttcatggaggtaaacatccagcagcgtccggaactttgctgatccgtgataccctgtacttttacccgatatttgaaatagtggtctatttttccttgaatctcccggttaagggcattatcccggatatttttgtcattggtcaacacgttctgaatagctttcgtggaagcgtctttctggaaactccccttgatgtcattcagttctttttcaccgatcgtttgggcgcatagcgacgccccggtcagtaataaagtaactaatgtaacttgtattttcttcatagtttattta

SEQ ID NO: 506 - DNA, 2999 bp, Butyricimonas faecihominis
gcttctaataatttatcctttaccacaccagaattcaatgttaaagaagaggcagttctcggatccactgttaatccctcgaccttataattcattcttttcccattcggagactttcctcgactacgatctgtataagctgcataaagacgagtatctagttttatccgtttatgaggttgaatatttaatcccacattcacattcatcctattaaaatcgctactcaacatgattccagattcactataatatcctgccgcaaccatataccgaattaactccgttcccccactagcctgtaaattaacattatatactttccccgtacgaaaagcttctttgtaccaatctgtagcattattataaaatggattcaaactatcttgtaagacacgaagtgcttttatatcatccttgtcaataggattacctttgttccagaaataatcatattgtcctcccataaaaccacttccttcggcaattgaattaggatattccccagtaaaaaaactagctgtacgataagcttttaatgctgctatattataatttcgttccatcatcccaccataatgtttcggagctttcgggaaaatagaacctgtatatgaaaaattagcagaaaagtttgaatgtccttgtttcccttttttagtcgtgataaggattacaccatttccacctctggaaccatagattgcagctgaagccgcatctttcaacacttccacggattcaataatagacggatctatttctgcaattgtattggttcccgtacgaggagaagtgaatgaatacatgggaactccgtcaatcacataaagaggagcactattactaagaggttcatcaaactgtgaattaaaagtattataaccccgaacaacaactaatgtccctcctcctcccggagccccggactggttcacgacctccactccagacatgcgtccctgtaacaaattttcaaaacttgcggtcggaagctccttcatctcatctgcctttacagaagatacggcaccaattaattccctctttttacgagaaccataggcaatcaccgttaccgcatccaattcagataaatcctcatccattacaaccagcacttctttgccccggtgaaataccaccctctgcatcttgaaaccaatatacgtgaataacaaagttcctgtcgaatcctttaccggtaaagagaaattaccattcacatctgtcgctgtacctgttgctgttccggctatcaccacggaaacaccaactaatggttctcccttcttatccttcaccacacctttaattattgtcgtggttacctcaatcctattttccgaaccttttttagcaataataatcgtgttctctttaatcatgtatgataaattcgttctatccaaacatttatccaacacggtagctaacaattcattattaacctgaatagtaatcccttttaccgttgccacaagatccttattgtacaacattcgatagccggactccaattctattctttttaatacttgttccaatgccatattttccaacttgagagtaatcctttccttcgtctgcccgaaagaagtaaaacttgtcatcatactgaaaaacatcacgataagtatgaaaaaacactttcgcaaaaggatatacctcggactacacgactgtagccgccaatcgttcaattcattcatatagttcaattttaataaataatgatttttataatcgagttacgcgtactgttttcgaatctataattgtaaaaccgatcaaattcgtgcatctcagcatatccaagacctgcgagatattttcatgtcgtttaatactcccgtaaaaaatgagttcttccgtttccggttgatcaaattcaaaagtaagatcataccaacgttctaactttttcgcaatagaacctaaactctcatcatggaaagtcagaaaaccttcatgccaagccacgtaaggagcgatatccaccctcttcttttctatcttttgaatccccggtacgaaaatggcaatctcattcggaaccaacgacacgctttcagtatccgcacattccggacaactcacgtcaacagaaccggataccagtgtggtttgcactattttttcatccggataagccgcaatattgaaagaagttcctgtaacctttatttccaattttccactattcacgataaaaggtgaagaagtatccttcgctacctcaaaatagccttccccgacaagttcaacccgtctcatccccttagaaaacttcaccggaaacttcaaacgagaatcagaatttaaccaaactcttgaaccatcggataacgtcaacagatactctgtaccccggggagtaatcaccgtattatatataatctcttcctcccgcaatatatcctcctgcatattttgataaacaattcccgccgtgtcgtttgttgccacgtttcttccatcgatctcctttacttccaacactttggccaaagaaatggtctttccatcagaaagttgtaactgcacaccggaacgatcaggagatgcaagagttttcatgagatattgttctctttcgcttgaaccctgtcgccataatatcgcaaatgtaaccacaatcatcaaagaagctgccacactgccccacgtgatccaacgcatccggttaaccttcttcttttgttgtatttcgattttccagaaaacacgatcatatcccttctccatatccgtttctccataaaagtgcatatcttgaacaaaccgagaaaaatgctcgtaacttttcaacaattcccgattacgtttgtcttctgccagccaagcctctaactcaaccttctcagaaacgcttaacgtttctcgataatacttaaaaagcaattgtataatgtgatacgttttcttgtccatgaaatctctattgttttataataaagacacatgaaaagaaaaaacgactaaagaaaattcaactt

SEQ ID NO: 507 - DNA, 2970 bp, Butyricimonas faecihominis
attttatatatttgacccctgaaaatatagggtacaattctaaaaatgcaaatttatggcgaaatttagattcttagctttacaagagattgcccgtcgtaaacccgtggagtgcggggaacgtcctaggtgttctgtcgtgtttggagaaaacgtgttttcaatggacaaaatgcgccactatctttccatcgaggcttacaaaaagttggaaaaagccatgtcagaaggattggcgattgatcgcggtttagccgatcaggtggccgccgcgatgaaagcttgggccgttgagcggggcgttactcactacacgcactggtttcatcccttgaacggtgccacggcagagaaacatgattcttttattgatttgttgccggatggtgacgtgatcgaatcgtttgacgggcgactacttgtccagcaagaacccgatgcatccagtttcccgaacgggggaattcgtaacacgttcgaggctcgcggttacacggcttgggacccggcttccccggcttttattaacaatcgcacgttgtgtattcccacgatattcgtggcttacacgggagaagcgcttgattttaagacaccgatgttgaaatcattggccatgatcgaccgggcagcggtggatatttgccagtatttcgataaagacgtgcagcgagtgatagccacgctgggatgggagcaggaatattttctggtggatgaggccctgtataatgcccgtcctgacctgaaattatgtggtcgcacgctcatggggcattcttccgcgaaggatcaacagctggaggatcaatatttcggctcgatcccggcacgggttacggctttcatggaagagctggaatacgagtgccattgcttgggaatcccgatcaagacccgccataacgaggtggccccgaatcagttcgagtgcgccccgatttttgaagaggcgaatctggctgtcgatcataaccagttgttgatgtccaccatgaagaaagtggctcgtcgtcataatttccgggtgctgttgcacgagaaaccctacaagggggtgaacggttcgggaaaacacaataactggtcgttgttgacgaacacgggagtgaacctattgtcaccgggtaagaacccgaaatcgaacatgcagttcttgatctttctggtatcaacaatcaaggccgtgtatgaacatggtgatttgctgaaagcatcgatcgtgtcgcaaggaaacgaggcccggctgggaggagacgaggcgccaccggtgattatgtccgtgttcttggggaattacttgtcgggaatgctcgacgagttggtggagaaggtgagcgaccgaaagatgagtccggacgagaagaccgagttgaaattgaacgtgggtaaaattccggagatcatgttggataacacggaccgtaaccgtacgtcgcctttcgcgttcaccgggaatcgttttgaatttcgtgcggtggggtcgtcagccaattgcgggggaccgatgatcgcgttgaatgctgctgttgccgagcagttgattgcttttaaaagggaaacggatgctttaatcgagaaaggcgttaagaaagacgaggcaattttccagatattacgtaaatacattatcgagtccaaacccgtacgtttcgaggggaacggttacagcaaggaatggagggaagaagccgcccgtcggggattgtccacggtggtggattgtatcccggctttaaaggcttattgctcggagaaggctaagcggttgttcgtggacaacgggatattgagtgaacgggagctagaagcgcgtttcgagatcaagaatgaaatttatttgaagaaattgcagatagaatctcgtgttttgggtgatctcgtgttgaatcatattatcccgaccgcgatcacttaccagaatactctgttgacgaacgtgacagcgctgaagaatatcttgccggattatgaatccgtggctgacgtgcaaatcgaggccatccgcacgatttcctatcatatccgggagatccagacgatggtgtctgatatgacggaagctcgcaaacaagccaacgcgattgccgacgaagtggcacgggccgaggaatacacggaaaaggttcgcccctatctggagaagatccgttatcacgtggataagctggaattactcgtggacgacgagatctggccgttgccgaaataccgggaactgttgttctcccggtagattttatacttgagcgtactcgctgggtgaaaatcgggcgagttcgctatctccaaaaaataaataaagatgtagtggtgtcccttccgattgatccccggaggggatttctatggttacgctttcgtcgcccctgcgagcgggtatgtcacgaagtagacggggagaacgtcgtagcgtgtcgtagaaatagcccacgaacacttggtctgacgaacttgctttcgggcaatcaataccgttttcccagttcaaggtgaccgtccacccgttgcgttccgtgccggtgatgacgggggcttctagtgttcccatggaaaaacggaaagttttgaatgcccatactcctttgcccgggagtaggcatcccccgttggttgaatggaataaagagtcgctcttggaaacccctctctcccgggccgcgattcgccatattagtaagtccccgatagcccgtttgtaaattttccacattttgcgggcttccgtgaatcggtccgtggtttgcttctctccctctgttctggattttctgggtccccgggtggatttgcatttccggactttccctccgtacaaaaaataagtatacccgtcggctttaaccggtccgtttgcaagtatggctaaaaatagaggagaggttatgtccatgtcaatactgatttaaaaatgaataattgatgaatactggtgcaatagtagtaataatattttgaataaacaatacc

SEQ ID NO: 508 - DNA, 2968 bp, Butyricimonas faecihominis
gaatactaactacataaaagaataaaatatgcccaaaggagtatttaaactaccaaacattaccaatgaacccatcaaaagttatgcaccgggttctccggaaagaaaagaattgaagtcacaaatcaatcaattgcgttctatcgttgccgatgttccaatgatcattgacgggaaagaagttcgcacggggaaactggtagatattcgtccaccacatgatcatcatcatctgctcggacattatcaccaaggggatgccagccacgtgcaaatggcaattgatgctgcattaaaagctaaaccggcttgggaaaaaatgagctgggaaagtcgggctgccattttcttaaaagcggctgatcttttagccggaccttatcgtcaacggatgaatgccgtgaccatgttaggacaatccaaaaatgctttccaggcagaaatcgattgtgtggcagaattagctgacttcttccgtttcaacgtaaaaaatatgtacgaaatataccatatgcaaccgaattccgctccggggatctggaatcgtactgtatggcgtcctttggaaggatttgttttcgcccttactccattcaactttacctctatcgcgggtaacttaccgggagccccggcattaatgggtaatgtttgcgtttggaaaccatccaagactgccgtttactcggcacatctgattatggaaattctaaaagaagccggattacctgacggtgttatcaacttggtttactgttcaggcccgacggctgccgatgttattttctctcataaagattttgcaggtatacatttcacgggatcaactcaagtattcaatgatatttgggctactatcgtgaaaaatattgataaatacagaagttatccgagaattgttggggaaaccggaggcaaggactatattttcgccgacccgacagcatgtcctaaagaagtggcaacagctatcgtacgcggggcgttcgagtatcaaggacaaaaatgttctgccgcctcacgcgcttacattcctgccaatatctggcccgaagtagaaaactacgtgcaaaaggacatggctagcataaaagttggtggagttgaagatttcacgaactttgtaaacgccgttattgacgaggcatctttcgttaaattgtctaacgcaattgatgctgcaaacaaatcggaagatgcagaagtgattatcggcgggcattacgatatgagtgctggatattttatccaaccgaccattatccaagctttcaaaccggattacattaccatgcgggaagaattattcggtccgatcttaaccgtttacgtttatgatccggaaaaagtagatgaaacattagatattctggacaaatcatcggcatacgctcttaccggagctattttctctaaaaatcgtgccaacatcgaggaaatgacagagcgtttaactcacacggccggtaatttctacatcaacgataaaccaacaggagctgttgttgatcaacaacctttcggtggtggtcgtgcatccggtactaatgataaagcaggaacgatctttaatctactacgctgggtttctccacaagccattaaagaaacgtttgttccggcaacgaactatatgtatcctaatttcttggaagaatagaacttttaattctccatacaagctgaacgtcatgtacgttcagctttttctttttagaaaagctgatacttccggtttacggcataaaaagtttctcgagaaacatgataaattcggcaaactgccgacacggacatcccctcttcaagcaaatggctaatctcttcccggttatccagcaacacgttttgctttccttttcccggcggacgtcccaaacgtactccttccgacttccggtgagccaaagcctctttagtcctcatcgaaatgagattatgctcaatttctgccaccaaggcaaaagcaaaagctaaaactttactattaatgctattgtcaaaagcataaccatctttcgtgctatataccgttatattcatttcaagacaacgatgaagaattgacattatgtctagcaatgttcgacttaatcgggataattccgtaacgattaatacatctccccttttcaaacttttcaacaatcgccctaatttccggtcatgctccttctttttgccacttaccacttccgtcacccaacgatttacggtcaagtttttccgtgcagcaaatttttcaatttcttctttttgattctcaagatgttgtttccctgtgcttacccttaaatatgctattgtcataacccttccgttttacaaaataaattaaaacaaagacattaatagtcattttataaaaaatactagacctacaaatataaacaaacaaatcacacaggtgtcaagtaaaacgttcattaaagttgacactgctttttacatgaaagattagatttttttatataccttttctttcgtgtaagggtcttgttagtaatatttttgcaagaattcatcatgtttctcctaaaatttggtatatttgtctagtaaaatgaacgtttagtctgacaaatagttttaaacaaggcgttaaatcatatgaaaatcgaattcacattcaggatgtaggattatataacaaattgattatgaacaaaagagaactcactaaaaaagtagcagaaagaagtggacacacccaagcaacttctgcattaatcattaacacatttatcagttgtatactggaatctcttgaagcaggtgaaaaagttacgattcaagacttcggaactttagctgtaaagcaacaaaaaacaagagaaagattcaatttgatcaccaaaaaagtggaaaaatattcctcttacgattacatcaagtttataaccagtaaatcgttaaagaacaaacaaaaagcaagaagtttagcaacaaaagaatagagatacataag

SEQ ID NO: 509 - DNA, 2955 bp, Butyricimonas faecihominis
attaagtgatatatactaaattttcaacgaatattattcatacttatattataccaactcccattcaactcctattcatttcctatttaactcctataaaaataagaaatgaattataattttataataattataaaatcaatattacgtcattactatatcatataatcaatttataatacacatacaagtattaaatccctacatctacccggtgaatacccacgaattacaggtcatagacaaaaatatcgtccacgatctcacttgaaaaaaagaaacgatgttgattcagtgagacacaattgtcaatcaggtgataaaaccctcatttcacttcccctttcacaatcaactggatccttggttgacggggatcattacaaaagagagtgataactttacgctgtttaccgtttcgcccggcagagtggaagatgacattcaagtccatttctttgccgggaagaaggacacgctgactggggagtaccgcggtacaaccacaagtggtttctattttacggatgatcaagttacgttccccaacattttgaattttaaaaatcatcttggcctcctctccttcccgaagagttccaaaatcacgttccgtcgagtccaccatgaaatgaggggcttgtgctttttcttcctcgctccaatgtgcaaaatcctcccgtacaggcacatcaatcataaacccgtaatcataattcacctccccgtttatcatgaaacgcatcacgttataataattacctaacatggactcattctttaaacgtaacgtcacgattaacgtgtcacaagttccgggttccacggtatatcctcccaaactccaatcctgttcggagtgtccgatcttccgacaggtgatctccgggaaatgattaaaaccttccaaacgaatccccgttttcgtgggattgtacaccaataccgtgtcggaacgctccttaccaatatatacctcactccaccctgccttttccttactgaaaaacaattctcctgccggataaatacactttttagaaggcttgtctgcagaacaagctcccagtaaaagagtgataatgaaccatccaaatgctctcatctctattcaactttagaaactcaaaattactacttttatactggaaaatggaaaatgccccatagaaaatgaaaaaacgaaggaaagaggcgggatatagataaaaaaatcctaatttcgtgccaatttacatgacacaaaaatgcgtaattacgattatatcattgtcgggagtggtttagcgggtctttacacggcctatcgtgcgtctgcctatgggaaagttgcactattaactaaatcaaacatcagggaaagtaattcttattttgcccagggaggtattgcagcagtcaccggagaagatgacgccccgttatttcactttcaagacacgatcacggcaggaagaggtctatgtgactaccctgcggtgaacgtactggtaaatgaagggcctgcccgcatacaggaattaatcaatgacggcatgcacttcgacacggaaaacggggagctagccctagggctggaaggaggccatcatcaaaaacgaattcttcatgccggaggtgatgccaccggaagaatgatcacgaatttcgtgattgataaagtggagcattgtcctaccgtggaaatattcgataatcatgccgtcatcgccctattacaggatgaacacggatgttacggtgtcagatgctgggattttaacgagaaccgggaagagatcttcacgggacacaacgtgttcttgacttccggaggaacctcggccatctataaacgaaccaccaatcctcacacaaccatcggagacggtttggctttaacctataatgccggatgcgaaatcgtggacatggaattcattcaattccatccttccgctatctacacgcctaccggggaggcatatctggtgagcgaagccgtacgcggtgaaggcgcacacctactgaaccagcaaggcgaacgctttatggtgggaaaacatgaactggctgaacttgccccgcgggacatcgtggcccagtccatattccaacaaatgaaagaacaccacgaggactacgtttacttatcattaaaacaccttgatccggaaaagatcagaaaacgtttccccaacatcttcgagaaatgtgcggaattaggtatcgacatgacagaccgtattccggttgctcctgcagcacattacaccgtgggcggggtgaaaacggatctcacgggacgtaccaatatcccacacttgtacgtgtgcggagaactcgcctcatccggtatcatgggagccaacagactggcgtctaactcactgatcgaatgtttggtgttcgggaaacgtgccgtggaagattccgtgcgtaaccgccgggaagacccgattccggaaaccatgcctttattctccctagatcgagagaaactagatgcctacctgtctttaaaaaacaaggtagccgacatcatgactcaagaggccggcattattcgcacggaaaacggattgcaggaaggattggaaaccttgctccgcttggaacaaaccgaaatattcgaagagaacgaatactattcgctggtaagtaaaaacttacttaccgttgccgaattaatcatccgttccgccctcttccgtaaagaaagccgcggcggtcatttccgttccgactaccccaccccgaatgatgactatgtttgccatatcattcaacagaagggcaaagagatcaaaacaacaccggtaatccagaacaattgaaaatggaaaatggagaattgaaaatgagaactcctccgcccttcgggtatctcctctataaacagaggaggagtttagttactcttcaatctcaagatggtatttttaactctccctctgtttatagagggagtacggc

SEQ ID NO: 510 - DNA, 2940 bp, Butyricimonas faecihominis
gaatatttgtagtttgtattgattttatatttggaaaatttttcaacttttctttaagtactaatcatgtgattatgatgtaattatgtgttcattttggaaaactttcctgttttgttagtaaaaatatttttccaagaagttttttttctttagttttgtccttatagaattggttgcaaaaatactatttatataatacgctaatggaacaaactacgaagaaagtggaaaagcaaaaagaaactgtgaaagaaaagaaagtctacacgcaggaggaggcttatagcagttccttgaattatttcaagggggatgagttggctgcccgtgtttgggtaagcaagtacgctttaaaagattcttacgggaatatttttgagttgaatccggatgatatgcatcatcgtttagcttcagagatcgctcggattgaaagaaattacatgaacccgatgagtgaagaacaaattttcgaggtgttgcgtgattttaaatatatcgttccgcaaggagggccgatgacgggaatcggcaacgattatcaaattgcatccctttctaactgcttcgtgatagggcatgatggtccttctgattcctatggtggggtaatgaaaattgatcaagagcaagtgcaattgatgaaacgaagaggtggagtagggcatgatttatctcatattcgtccgaaaggatctccggtgaaaaactcagccttgacatctactggaatagttcctttcatggagcgttattcgaattcgacccgggaggtcgcacaagatggtcggcggggagcgttgatgttgagtgtttccatcaatcacccggattcagaaagtttcattgacgcgaaaatgactgaggggaaagttaccggagctaatatctcggtgaaaattgatgatgagttcatgaatgcggttatcgaagaacgtgattatattcaaaaatatccggtatattctgacgagcccaaaaacgtgaaacagattagtgcggtaaaattgtggaataagattgtttataatgcatggaaatctgccgaaccgggtatcttgttctgggacacgattattcgggagagcgtgcctgactgttatgctgatttgggttacagaactgtttctacgaatccttgtggagagattccgttgtgcccgtatgattcatgtcgtttgctggcgattaacttgtattcttacgtggtaaatccttttgaaaaagacgcatattttgattacgagttgttccggaaacatgtggctattgctcaacgtttgatggatgatattattgatttggaattggagaaaatagatgccattcttgaaaaaattgcatcagatccggaagacaacgaggtgaagggtgttgagattcggttgtgggagaaaattaaaacaaaagccagagaagggcgtcgtaccggggttgggatcacggctgaaggtgatatgttagctgctctcgggttgcgttatggtagtgatgaggcgatagatttttccgtggatattcataaacagctggctgttgccgcttatggttcttctgtcgagctggctaaggagcgtggtgcgtttaagatttttgatgttgaaagagaaaaaaataatccttttatttctcgtttaagagaggcttccccagagatgtacgaggaaatggtgaaatatggtcgtcgtaatattgcttgtttgacgattgccccgacgggaacaactagtttgatgacccagactacttccggtatcgagcctgtattcttgccggtttacaagagaagaagaaaggtgaacccgaacgacaagaacgtgcatgttgatttcacggatgagatgggggatgcttacgaggagtttaccgtgttccatcataaatttgccgtttggatggagaaaaacgggtatgatgttcataagcgctacacgaacgaggagattgatgaaatggtggctaagtcaccttattataaagctacttctaatgatattgattgggttgctaaagtacgtatgcagggacgtgtacaaaagtgggtggatcactccatcagtgttaccgtgaatctgcctgcagatgtttcagaggagttagttggacagctttatattgaggcttggaagagtggatgtaaaggatgtacggtttatcgtgacggttctcgttctggagttttggtttccaataaagataagaagacggatggggcaatgcctgctaagcgtccgaaagaattggatgcagaaattgtgcgtttccagaataataaggagaagtggattgcctttatcggcttgtatgatggacgtccttacgagatctttactggtatcgctgatgatgaagagggaatcatgttgccgaaagccgtgaccgacggtaagattgtaaagaacacggatgaagagggaaatagtcgttacgacttccagttctcgaataagagaggtttcaagacgacagtcgaggggttatcatataagtttaataaagagtattggaactatgcgaaattgatttccggggtcttgcgttatggtatgccgatcaatcaaatcgtggatttggttgctgccatggagttcgataatgaaaatatcaacacgtggaagaatggtgtggaaagagcgctgcggaaatttatcccggatgggacggaagctacgggttctgtttgcgagaattgtggttctaaatccgttatttatcaagagggttgtttgatttgtaaggtttgcggttcttctaaatgcggttgatgattatatggtaattatataatagactttcgagttataagtgaaggtggccagattagtttggccaccttttttcgtgataattgatgtgctaaggggttctacttgattttctttaaaaatgaatttttgtatttattgaaaatcagatatttgcacaagtaaaaaagat

SEQ ID NO: 511 - DNA, 2932 bp, Butyricimonas faecihominis
gtttattttattaattaatatattttcaaatagatggaagaaatcaaaaagtacgtggaagagaacaaggaacgtttcctgaacgagttattcgagttgattcgcattccttcaatctcttcattgtctgagcataagccagatatgtatcgttgtgccgaacaatggacgaaaatcatgttagctgccggagcggaccgggcagaagtatatgaaacagagggtaatccggttgcttacggggagaagatcattgatccggctcttcctacggtgttggtgtacgggcatatggacgtgatgccggttgacccgatcgagttgtggaacacgaaacctttcgagccggttattaaagatggtaaaatctgggctcgcggggctgacgatgataaaggacaggctttcatgcacgcgaaagcgtttgaatatttaatgaaatccggaaaattgaactgtaacgtgaagttcatgatcgagggagaagaggaaatcggttccccgagtcttcccaagttctgccgggatcataaggatatgttgaaagctgatgtgattctggtttccgataccagtatgattggccgtgatattccttcaattaccacgggattgagaggtttggcttactggcaggttgaagttaccggtccgaacgctgatttgcattccggtattttcgggggagcggtggcgaacccgattaacgtgttgtgtaagttgattgccgatatgcaagacgaaaagggacatatcacgatccccggtttttatgatgacgtgttggaagtaactgccgaggaacgtgcgaagatggccaaggctcctttcaatttagaaaattacaagaagtctctagatattaaagaggtgaaaggcgaagaagggttcacgaccaatgaacgtacgggcattcgtccgacattcgatgtttgtggaatctggggtggttacacgggagaaggagccaagaccgtattgccttctaaagcatacgccaagattagctgccgtttggttccgaatcagaaacacgagaagattgcgaaattgttcaaggaatatttcgagtcgatcgctccggattacgtgaaggtgaaagtggattacctgcatggcggaccttcttatgtgtgcccgatagatctcccggcttataaggctgccgagaaagcatacgaagaagtgtatggaaaacaacccgttccggttcgttccggtggtagtattccaattattgccactttcgaggaagtgctgggaatcaagtcagtactgatgggctttgggttaggttccgatgctatccattctccgaacgagaactatccgttggagcaattctttaacggaatcacgacaattccattattctacaagtatttcggagagattatgaagaaataaattttgtagtctataatttagactcccctcattttacggtcgtaaggtgaggggtgttttattattgtctggaatccattgtttggaatacgtgaaaacgggttttacgtcctccgccttcgatggagaattgttcggtgtgctgggagccgtttcgggcattcagacgtagtgtgaggttattggtaccggcagataggggcagtcgggtgtaggaaatcgagtaaggtagtgtttgccagttgcgggtatcggctttttcggtgaggctgttagcgataccgacggcaaagcctagccattcgttttgcttacgggcagagtattccagtccttttttggcggctacccgaagaagagaatttgaaaattcccgtaccattcggtcccgtaaggttttgaatgcaatttcattgatattttcggcaagttccaacgggtacgagtgattgtccgtcacgagagttcccgtggcataaagtgggggacgttccatgtatttggggaacgcgacacgcagggtttgcagatcggcaatgctttgtttttcatcatcactgtatcccgagccgaagaagaaagggaaggtaagtccgagggattcgttgtggaatacaatcgctccgtctcctcttttttgtttgacaaaatttatgctccattctgcctttaccggccccataccgtttagccagaaaaacacgagttgcccgtccgtgggtgtcggggaatgggtgtatgtcgtgttgaattctttctcgtattgttttaattcagctgtaaaaccacaattataggcggtacgcatcaagtcctgttttagttgttccggggttttcacaccgaagtttttaatatagtcggactggtagacctcgtaggcatttcgataggcgataaacgcattgttgtaatctcccgtggcatcgtagatcaggcccattagtagatgagcgaaagcatctcgttgataccggttcttgttatcgggatacttgtcgtttagctggttgagtttgatgttgattttacgaacctcgaccaaggcgccttccatgtcattcagatcaatgtagttcaaggccttgtagaagttaatcatgatgacctcgaaatcttccggtcggtaggggcgtgcttccgggttggtcaccaatgccgcggcttcagccccgacattactgtgatactcgtcaatcaggttctcggcggtctcgaagtattgattgctgttggtgggattgccgagcatgaattccacgtatcctttgttgagataatagaggatgcggtttttacccgtggcttgttttttatctttatctaggagtttgtttgctttctcgaagtttcccgtgttgacggctgcttggaaatctgccgttcgctggtaccaagtggcgcatccggagaaaagaaaaacgagaagaagtcctaggagtttataaggtttataaagtttataaggtccataaggtttatgaatcccgattttatttcttttaaagtatggataatgaatatt

SEQ ID NO: 512 - DNA, 2914 bp, Butyricimonas faecihominis
gggaaatcggcgagtaagcgaggacagacagagagtttactcgttgtctgtcgagcgagagccgattcgagaccggcttccgggctcaataccccgaaggggggagggagtttgaaaaatgactttttagacagccccagttagaatacacaccgccttcgggaagctttccattctaaattctaaactctaaattctaaattttcccctgcgcccggaatctaaaatttaaaattagtaaatctaaaattgagatgactatattggatatgaccggggtgagccgggttcgtttacggacggtgacggggttcaagcggatggggaagtgggtgttccggttggcgaagaatcacgtgaaggtgacccgggagaaacacccggagatggcgcgcacgaacgaggatttcggttcgtcgaggaagtttttcgcgcggctgaataacgcgatgggggatttgctggcgtggaggattgccgcggcgaagtacgggggtggcatgacgggggataatttcatgtttcacgtgaattacgacaagctggaaggtggcgcggtggcttgtttccggcttttccgtttcagtgtcggcacgttgtggttgccgtggaatctggccgtcacgcgcgagaaggggacggtgacgatcacgtggcgcgataatcgccactcggcgcattgttccccgcgtgacgagttgtgcgtgggggtgctgtacgagaagttcccgaaacgcccgatggttatcaaggacacgggggcgttgcgctctacggggaggtacacgctggtgctggattctcgtttcgggacggaggttcacgtgtatccttttttcatgaacccggggaggacggagttttcggatagtgaacacctttggtgattaagtgattaagtgattttagattttagattccagccgcacgaggccttgctgattttagatttaatgattttagattttagattgaactccctctgggagggtgtgtcaaaaggtattttatcctcaaaaaactcctccgtctgcttcgcagccacctcctctatgaacagaggaggagctggtgaaacttcccgaagacaggtagtattttagtcctccccctgtgtaagggggagttagagggggtagtttttatcttttagtttttatttttcctcttctcttttccaatcgccgatgtttctttgggcggggtcgaagttgacaccgattttgacgagtttccggccgtcaacggtgtagggaatgaggtagccccggtcgttgatctgggcgagggcttggtcggcggagccgtcgagtttgaactcgaagacgtagatgtagtcggcagttttcacgacggcatcggcccgtcccttggcgctccggacttcggtctcggcgaattgtcccatgagtttgaagacgaggtagaagatcgtctggtagtggcgttccgtgcggttgttcagctcgtaggagatgccggcgaagaaggctcgcaggcgggtgaggaaggcatcgacatcacccgattccagctcgtgaataaatttgccgatgtagaaactcgtctccgattcggccacgggggtgtagaagggggtgacgaagtttagaaacccgtatttcacctcgtcgttggggaaccctagggtgtatatctggaaacgttcgtcgtatttcttgatggtgaggtatccgctctggtagatcatggggacggggttgttgatgttggcccggtcgtcggagagggaggcggcggagacctctatgccgtcgagttcccgcaggtcgaagtcggtctttttcagcatctcggcgaggaaggtaggagtgccgctggcgaaccagtagttctcgaacatggttgaatccagcacgttgagtatgctgaacgggttgtagatgcccaccatatcgcgatagttgaaatggtacccgtcatacatccgggtgaggcgttccatgcacgcctcgtcgtcgaggttattttctttggccagtagttttagttccgggacgaagtcggcacgaatctcgtcgccggtaaggccgcagagcgcggcgtacctagggtcgagactgatgtctttcagctggttgaggttgctgaaaatccccatctgggcgaacttggtgacaccggtgatgaagacgaatcgcagccactggtcggcactttttagcacggtgtagaaggcggtgagcgtttcgcggaaggctttctgcaatgcctcgtcgtggaaactgttgagtagcggtttgtcatactcgtcgatgaggacgaccacgccgcgcccggttttctcgttcgcttttttgatgacttccatgaaccgcccggagtgggtgatgccctcgcccccggtttcgtaggttttttcccatccccggagctggcgttcgagcatgtcgtgcagtcgttcgggcgagtcgtatttctcggcgttgaggtcgaggtgtagtacggcgtgggtgttccattccgtttcgagccgctcgatggcgaggcccttgaataggtcgcgcttgccgaggaagtaagcttccatggtggagagtaggagactcttgccgaaacggcggggacggctcaggaagtaagggttcgaggtgctgacgaggcggtacatgatttctgtcttgtcgatgtacacgtagttttcgcgacgtagtttctcgaagctttgtatgccgatgggcattttgcggggaaaggatggtaattgattcatggttgccgtgtttgttttcttttacgcgaagttacgaaaaacttggttacgttggagataggaggggaaaactaaaagataaaaactaaaagataaaagttgaagagagtttagatcttactaattttagatttagagattttagattttagattccgggcgcacggggcggcgccgaac

SEQ ID NO: 513 - DNA, 2908 bp, Butyricimonas faecihominis
atgatgaaaataaagaatatattttatatcatatcgttcgttctactatcctcgtgtaattacctggatgtagaaccaacaggaaaagtgatcccggaaaaagtgacggaatttagggcaatgatgacgtctgcatatagtaagtttcctaattataaacatttgctgagtttacgtgcggatgaaacatttccttttacgggagaatacagtgcatatgatcggtttgttgattttgctatttggaatgataattctcccagtatgacggaaacttatccttgggtgacgttgtataataccattttttacacgaatagcgtgatagatgatgtgatgagttcggaggtggatacttatgatgacacgaaagagcaaataaaagcagaagctttattattacgagcctatgcacattttgaattattgaatttgtatgcagttccctataatgcttcaacagcggcatccgataaggggattccaatatcaacgagaattgatatagaacaggattttgttcgggcaacggtagaagacgtgtacacgcaaatcttgtctgatatagaagaaggacgtggtttactacaagttgatgagcaaccggtaagtgtaaaatatcgtttctcgaaggaatcaggtttggctttggaggctcgggttcggttgtaccgtgcagaatgggataaggctttagctttggccgaggaattgataccaacgtgtcagttggaggatttgaatgatgctgcagcgacttctccttatgatgtgtcttctaaagaggcaatattggcattggaaagagttgttagccatgatttagcaaccgagacttatattttacctgcgttgaaaaatcaatataatctggaggaagatttacgtgtaagtcgttactttacatcgaatggagatgatcttgttccgaacaaatgtaatggagataacatgaaagtaacattccgtagtggtgagatttatttgattgctgcagaagctgccgctcatgtgaatgggaaattggatctcgctaaaactcgattaaaagagttagtaaagaacaggttgactcctgcatattattctcggaaagcctctgaaattgatggaatgggacaagaggagttaataaatgaaatagcaaatgagagggctcgagaattggctttagaaggacatcggtggtatgatttgcgtagaacaacacgtcctgagattgtaaagacatatacgaatcaagaagggaagacggagactaagacgttggggaaagatgatccccgttatacgatctcattcccgttggaggctacaacaaataacccgaatttaagagactaatttgtatgttactaggttgatctagtagttggaaggccgtgggggtggttccccacggctatttttattgtttcatgaattattttcgttatttttgtgaatactgaaatgatggatgaaagaatccggagaaagtattgataaaaatagcctatgaatgcaattataattgaagatgaatatcttgcagcggcagagttggaacggttgttgggagaggtagccccggagatcacgatattgacgaaactggattcggtgagcgagagtgtgaaatggttgaagaagaataaggccgatgtgattttcatggatattcatctgggggacgggcagagttttgatattttcgagcaggtggagatcacggtaccggttatttttatcacggcttatgatgaatatgcgctcaaggcattcaaatatcaggggattgattatatattaaagccttttgataaagaggaattacagcaagcattgaataaactggaatcgctttccccggtaaatgctcctttccccgtggcatcgttgaccgtgtatcaggagcgttttctggttaccgtggggacgaagatgaaatccgtaacggtgggggatgttgcctatttcatggcggatgggaaatatctggtacttttcacccgtgacgggcaaaattatattttggatcaaacgatcagtggtatagagacgaaattgaatccggcacagtttttcaagatcaataggaaatttattatcagctataattcgatcaaggaaatggtgaaatactccaatagtagaatcaagatcgtgttaaccccggcgcctcctgccggaattgaggcaatcgtgagttccgagaggattcaagagtttaagcaatggctgaatcaatgaagtaaaacttataaactaaagacgtgccaaaagttccttttgacacgtctccctattgattacctagttgtttaacctgtttaatttcccataaagacgatacctacgctgatcgtgaagttttgcatggcttccactttcccggatttggttccgtaggtgtatttagccccgatgttgaatgcaaattggtcattgacggggataatggtacctatttcgggtgcgaaagcgaattgccatcttgcgttcgtggcagtgaattgtcccagatcggtttttagttctgtccaactggtacctaatccgagtcctaggtaaggtctgaacatggtgttttgatctgtcagccagtaacgtcccatcaccatgatgggtaccgtgttgatgtagcggtattgataaccggtgatcgtgtgaatatctttgctacctttgaacaggaagtctcccgttaatttacctttgtccttgtagaacgtgttccaaccgatcatacccccgatagagaatttctcgtttaggaaatgatggtattcaagatccatacctcggaaactcattttgccggcatagtcattcatttttccaagtggaacagacatctggtagtttaagttcagcatttgtccttttactaatgggctaagcccgaatagtatgagcgatataatta

SEQ ID NO: 514 - DNA, 2906 bp, Butyricimonas faecihominis
acatattatattgggagtgacaggcagtattgccgcatacaaggccgcaacattaactcgtctgcttgtgaaagaaggggcgagcgtgaaagtggttatgacccctttggcaaaggaatttattacccccttgacgatggcaactctttccaagagtccgattatggttgatttttataatccggaaaatggagattggaactcacatgtcgatctgggattgtgggctgatttgtatttgattgctccggcctcagcgaacacgatcggaaagatggcgggaggtattgcagataatctattgttgacaacttatttgtctgccaagtgtccggtgatggtggctccggcaatggatttggatatgtataaacatccggcaacgcaacgaaatttgaaggtgttgcaatcttttggtaatattattatcgaaccggaaagtggggagctggctagtggcttgattgggaaaggacggatggaagaaccggaaaagattgtttcctttatcacggattattttgcccgacaagcagattttaaaggtaagaaggtggtagtaacagcgggacctacttatgaaaaaatagatcccgtacgtttcatcgggaattattcatccgggaaaatgggcttggctattgcggaggaacttgctggacggggagcagaagtagtgcttgtgtgtggtcctgtaaacttgaaaacgtgtcatccggcgattcgtcgggtagatgtggagtctgcagctcagatgtacgaagtaacgtcaaaagagtttgtcaacagtgatgttgcggttttgagtgctgctgtggctgattttaccccgaaggaaaaagccgatcacaaaattaaacggggtaaggatgatctgttgctggaattactgccgacaaaagatattgctgctgaattaggaagaataaaaactgcgtcgcaattattaatcgggtttgccttggaaacgaatgatgaagagataaatgctctttctaagatgcagcgaaagaatttggatatgatcgtcttgaatagtttgaatgataagggagcgggctttagcgtagatacgaataaggtgacaattctggataaagcgggagataagactgtctatgagttgaaaacaaaggtggaggttgctaaagatatagtcgaccagatcgcttcccggttgtagtttatatatggaatttttggggtgaattttttttcttgtaactggttcgtttgcaggaattcttgttttcgtgcgaactattttggaaaataaattggaaaatcgttttgttcggatggaaattatgcataattttgtattccgatatgaagatagaacatcaaaatattcggcgaagattgtttttatgcctgcagtttaggcagagacataatcgttgttttaacaagatacagaaaaccaacattgtcgttagttgacattgttggtttttttttatatgggagagtatgaacgaacataaacatttttaatatatagaattatgaataaacgtagcttagtatccattaccgactactcgaaagaggacattttggaagtattgaaaatagcttctgaatttgagaaaaacccaaatcgtaatttattagagggtaaggtggttgcttccctgtttttcgagccatctactcgtacgcgattgagtttcgaaacagctattagtagaatgggaggtcgtattgtcggattttccgatgcttcatcctctagtacgacaaaaggggaatcattgaaagatacgaccaagatggtggataactactgcgacttgattgtgatgcgtcatcctttggagggggcagcccgttttgccagtgaggttgctgatgtgccggtaattaatgcgggagatggtgccaatcaacacccgactcaaaccatgttggatttgtattctatctataaaacgcaggggacccttgaaaatctgaatattttcatggtcggggacttgaaatacggaagaacagtccattctttattacaggcgatgagccattttaacccgacgttccactttatttccccgaaagaattggagatgccgaaagcttacaagttgttcttggacgaattgcatattccttattacgagcataccgagttggatgatgtgatcaatgatgcggacatcctttatatgacacgcgtacaacgggagcgttttgcagatccgttggagtacgagaaagtgaagaatgtatatatcttgaaaaactccatgctggcagggacaaaggataacatgaagattcttcacccactacctcgcgtgaatgagatcagtgaagatgtggacgataacaagaaagcatattacttccagcaggctttgaacggggtatacatcgtcaggcaattattttcaaagcattagatttaaaatggtaattaaagaataaagagatatggcagcaaagaaagaattacaggttagtgccgtggagaacggaacggtaatagatcatattcctgcagagaaattatttgacgtgattaacgtgttgggaatccagaatttggagaatacggtaacttttggttacaatttaattagtagcaagctgggtaaaaaagggattatcaagatttgggataaattcttgaaagatgatgagataaacaagttggctttggttgctccgacggcaaaaatcaatattataaaagatttcgaagttgcggagaaaaaagcggttatggtgccagagcacgtggagggaattgctaaatgcgtgaacccgaaatgtattaccaacaaccagaatgttcgtacaaaatttgatgttgtcgggagttctcctatcgtgttgaagtgtcactattgtgagaaattaactgatcaagaacacatcgtaatcatttaatgatacaaagc

SEQ ID NO: 515 - DNA, 2885 bp, Butyricimonas faecihominis
atatataggaatttacccctcaaatcttttaaatacaatgctttcccgtcactatcctgtaaagaaatattcggagcggtagcccccggagacagcttacgccagcgatctaccagttgttttatcttcaccattttactggtgtcagacacttcattccaacatactgccaataaataatcggcatcttttaacccgttttcctgaaaataattataaacaacctcggataataaataatcccgaacctttacactattgacatttgagcggatataattaaccaagcgacgcatactgaagttttgtcccttgtaataaatataagtcaaaacaaaacgttgatagctatcaaaagctaacatatcttcgttattaatgtcaaactcggacacgaaattatcatacaatgctcccggtttatacaatgtatcaaaagccacatgactacgaggataatgtattgcctgttctgcaacacgatacctaatccgttcccgttcctgctttgtgaattcttctcccaagttctttgcctctaacaaaacgatactagtattaatattttcccgcatcctattcacaaaatccttttcgttcagtttatataaattaggatcataaatatgatatcgattttgttgttccttcaaataagtattgatcgcactcaacgtacctttaaactgcaaggaattggacacattcctcacgttattcatactgatttctaaatcttctccgggtgttaaaaaaacttgaattgaataaggaatgaaacgagcataggtacccttttccagttctatcttaccggaaaaataatgtttctcatccaagcgaaacttatgaaggctatcatttacttgaaaataaacaacagtatcacccgtctctacccggcccgacacttgtacgcttttattacgggtacaagcaacgaaaagaataataattattatacctacaaaactcctcatgcgtcaacacattaatttttagaatacaaagatatatattcagcaaaaaactatgtgttaaaaaaaaggtaaataaaaaaggcaaccgcatggttgcctttttgcatatcttaacagataattattttgttattgcaatgaagtcgttgttttcaaagaattttgcaaattccatatcggttgcagccaattgtttgaatgaaccatccaaagaacatgcttttctcaagttctcgattactgcagtagcatcattggttctagcaccaataacagctttcaagtaataagacatcggacattctttgttttcagcattcaatttcttcaatgcctcgttattatttccagcaagcacgttagctaaagcagcattcacgcaattgcattgaccgaaataatttacagcagcagcatagtcaccactcttaatagccacgatacctttgttatagttaacttcgtcaccagcaccggtagcagcaccgaaataaatttcagcttgtttcaaatcaccattcttcaaagctactgcacccaagttgttttgaacaaccggattgttagctgacatagagttagctttattgaaattagattgagcagcagcgatattacccatttcaaattgaatcataccagcatcattgaaacctctccagtcattcgggaattgtctcatgcaagtttcatagatagccaatttgtcattgttgttatcgaataaagttgcagaataaagcaattcctcaacattcaattctgcaggacttgatttagctaaagctttcaattcatcatctgacttaccaatcaattcagtatttacaacaaacaaagatcttcttaatttcggaaggatctgatcagcaacaactgcgaaagcagaggcgatattcttgatttctctttctcttacttccggatcagagtgcatagacaaaacgcgaagaatcaattctttatcttggatatttgattcctccatagcttttttgaatccgtcccagtcttcagctacaacgaaattcttgaagaagttctcgtctttatactgatcaactttacctttcttcatttgttttttcaagaaagtagaagaactcttttcacgttggttagctaatttctcgttgaagtcataagcaccatcaggagaagcgtatgatctaacatcaattccgttcaagttcatattttctttagctgcagcttctttgatgtaagcctctaactttttcatttcctcagaagtcatttctttagaacgaatgtttgcagagttaatcaaataatagatagcagcctcttcttgttgtttgataatccgttggaatttatcctctccgactgaagttgcaggagcatttactactaaagtttcagtagcaatcacaccatcaccaatttttctcggatcgaatttcacggttttagcgccttttgccccggtaatatcgatttccaaatcagaaagtctcattgcatcctcgtaaggaatacggctcatgtaagaaacggtcttaccagtttcgtaaggaatcacttctgcattaccctgaactttctcaccttggatagctttcatttcataagctttctctcctcctttgaaacgcaatacaggggtagcctcaatagccacttttttgttaaaatatttagccgggaaagttacgtctatcttcaaatcaaccattcctcctttagccactaatgtctccggagtaacagaatacgtgatttctcctgcacgtttcttcattttattcaatgaagaacaggacacagttattaacccagataaggcaacaacggcaacaaaacctaatgtttttttcatactcgtcttaatttttattgtaatactcaaattagttcacttcctttttcacaaaacaaatg

SEQ ID NO: 516 - DNA, 2881 bp, Butyricimonas faecihominis
agataataagtagtataatgaataagtttctgattctattaagcagtttgtttgcgttgactttcttcggttgtaataacgatgaagaagatctcgatttgattgatacattggaaaatgagaagatcgctattcacgagtacctgagtcagattaccacgccgattctttatcttgagtattatagcgtgaaaggcatgttgatcgataccgtctttattttcaattacgataatagtggcgaggttgcgaaagatacaggatgggtgttgatggattacgagaaattctatctaaatggggataaattggatacgacatctcccgaacagggtgattccacgtttacttatgcttttggaggaccggttctttatcgttatgacacgatcaagaaatatgattatgtggcagaagcgtttcgacatattagtgttggaagtatgggtggagaaatgattgtaccctctattttggctggagataagaataattacgggaaaccgttacattataagttaaaggcacataagctcattaacgatgtgaaagtgaatgagtataagttgattcgaagttatctagtagacgttataggcgtggagagtgcttttgttgactttcctacgcgagaaatttcatctattggagagcgggatacagttacttatacagctattttggagaaaggaacgggcgatcaagatattcaagtaggggattctgttttgttggaaatggattatggtttgctggatgatgtgggattacaaaatcgggtgttgagaagtatgggacgtgattctatttatttcttgtttaatgagacttggcagaaaaattatccgactgggttggtaaaaggattacaacatttacaggctggagattctgcacatattatcgtgccttatggaatggcttacggtgcggtaggtacaacccgggaaataactttccgagatcgtactaaacttaaacaatatttaattcctccatactcaacgttatggtattgggtacggattcgtaaagtggttccgcctaaaacggaagaagaataatttgaaaaataacagctaaataaaaacggaaaatgaaaagtaattatttatttatgatgttttgccttttggcaagcggattcatcgggtgttccgatgatgatggcgataactggaagaaaacatttgaggatgagcaggctaggattaaagatttcgtgtatagtaaggattccgatccgaagatcttcacgtatcattatacttacttgaaagaaaatatcgaggattacgcttatttgtttaattaccagaaagaaggaaagaaagcaacatatggtgatttcgtttggattaactacacgcaaaggagcctaacgggaaatgttatcgactcttcagacccgagtgttgccgttggtgccggagtttctccctattatactttaggtggaccgattttggtacaaatgaatacggataaggataaatatacagatccgttatcagatattttaatgaatatcccggaaggaacaacggggagttcaatcgtttcgagtattatgagcctttcaacagctttagtttatcgggaatataccgtggagggtatcgtgaaggaggataatctacttgcttttgagaacgaaatgatcaagcagtatatcaaagataacgatttaacagtttctgaaactgtttatttacatgaaggggcaaccgacacgattgctttaattgtcaagacaaaaaagaatttgagtggaaagtctattcaagcgacggatagtgttaccgtgtgggcggagggaaagattttagatgaatataatactcctttacgacaattcatgaaaatggagagtgatgatgaggtgaaatggtttttaccgaatatgataaagggaatctctttgactttgcccgaacttagagttggggaagaagctattatccttttttcatctggtatgggatatagctatagcggattgcgagagtatgatggttcttatgtcatcccggcttattctactttattgtttaaagtaaagattattggtacaaaggaaaatcctaaaaaggaataaattatcatgaatatagatttggaaaacacgctggcgcttgcggtggcatgggcgaaagaggtaggggaaattcaatgctcttatttcagaagtggacacttggaacttgaaacgaagtcaacggtacatgatgtcgtgacgaaggtggataagctaagtgaatccatgctgatcgagcgtatcggcaagtgttttcccggtcatagtgtgttgggggaagaaagtgggaaacatgatgctcatagtgactatctgtgggtggtggaccctttggacgggacaaataattatagtcaaggattacccgtgttttgcgtgtctatcgggcttcaataccggggagagacgttattaggagttgtgtacgctccgtacttgaacgagctgtacacggcaatccgaggcaaaggggcttttctaaacaatgccccgatccatgtttccgacaagacggaactcgatcgttccgtgctggccacgggtttcccttacgataagggaatacatcctgtgaataatattgataatattagccgtattttgccgcatctgaggggtatcagacgcatgggttcagccgcttacgatctttgcggggtggcagccgggtttctggacgggtactgggaactgggtttgaagctctgggacgtgtgtgccggggtgcttatcgtgcaggaggcgggaggccatgttgaacctttccgggaagaccgggggattgctatactggcaggtaattcggtgatagtagaaaaaatgaaagggtatataagttaaagg

SEQ ID NO: 517 - DNA, 2878 bp, Butyricimonas faecihominis
tgattaccccgaaagcggttgtagccaaggaggaagagaaaacgattctgatgaaagggcaggtggtggataaaggtggggcatagcccttatacacatctccgagcccgcgagacttggctgaatctcgtatgccctcttcctctttaaaagataaattatgtctaatattcaaactggcgccgagcgtatgccgcatgacctttcccatcttggcttccttgctggtcagattggtcgtcttattaccatttcaactactccggttatcgctggcgactccttcgagatggacgccgttggcgctctccgtctttctccattgcgtcgtggccttgctattgactctactgtagacatttttactttttatgtccctcatcgtcacgtttatggtgaacagtggattaagttcatgaaggatggtgttaatgccactcctctcccgactgttaacactactggttatattgaccatgccgcttttcttggcacgattaaccctgataccaataaaatccctaagcatttgtttcagggttatttgaatatctataacaactattttaaagcgccgtggatgcctgaccgtaccgaggctaaccctaatgagcttaatcaagatgatgctcgttatggtttccgttgctgccatctcaaaaacatttggactgctccgcttcctcctgagactgagctttctcgccaaatgacgacttctaccacatctattgacattatgggtctgcaagctgcttatgctaatttgcatactgaccaagaacgtgattacttcatgcagcgttaccatgatgttatttcttcatttggaggtaaaacctcttatgacgctgacaaccgtcctttacttgtcatgcgctctaatctctgggcatctggctatgatgttgatggaactgaccaaacgtcgttaggccagttttctggtcgtgttcaacagacctataaacattctgtgccgcgtttctttgttcctgagcatggcactatgtttactcttgcgcttgttcgttttccgactactgcgactaaagagattcagtaccttaacgctaaaggtgctttgacttataccgatattgctggcgaccctgttttgtatggcaacttgccgccgcgtgaaatttctatgaaggatgttttccgttctggtgattcgtctaagaagtttaagattgctgagggtcagtggtatcgttatgcgccttcgtatgtttctcctgcttatcaccttcttgaaggcttcccattcattcaggaaccgccttctggtgatttgcaagaacgcgtacttattcgccaccatgattatgaccagtgtttccagtccgttcagttgttgcagtggaatagtcaggttaaatttaatgtgaccgtttatcgcaatctgccgaccactcgcgattcaatcatgacttcgtgataaaagattgagtgtgaggttataacgccgaagcggtaaaaattttaatttttgccgctgaggggttgaccaagcgaagcgcggtaggttttctgcttaggagtttaatcatgtttcagacttttatttctcgccataattcaaactttttttctgataagctggttctcacttctgttactccagcttcttcggcacctgttttacagacacctaaagctacatcgtcaacgttatattttgatagtttgacggttaatgctggtaatggtggttttcttcattgcattcagatggatacatctgtcaacgccgctaatcaggttgtttctgttggtgctgatattgcttttgatgccgaccctaaattttttgcctgtttggttcgctttgagtcttcttcggttccgactaccctcccgactgcctatgatgtttatcctttggatggtcgccatgatggtggttattataccgtcaaggactgtgtgactattgacgtccttccccgtacgccgggcaataatgtttatgttggtttcatggtttggtctaactttaccgctactaaatgccgcggattggtttcgctgaatcaggttattaaagagattatttgtctccagccacttaagtgaggtgatttatgtttggtgctattgctggcggtattgcttctgctcttgctggtggcgccatgtctaaattgtttggaggcggtcaaaaagccgcctccggtggcattcaaggtgatgtgcttgctaccgataacaatactgtaggcatgggtgatgctggtattaaatctgccattcaaggctctaatgttcctaaccctgatgaggccgtccctagttttgtttctggtgctatggctaaagctggtaaaggacttcttgaaggtacgttgcaggctggcacttctgccgtttctgataagttgcttgatttggttggacttggtggcaagtctgccgctgataaaggaaaggatactcgtgattatcttgctgctgcatttcctgagcttaatgcttgggagcgtgctggtgctgatgcttcctctgctggtatggttgacgccggatttgagaatcaaaaagagcttactaaaatgcaactggacaatcagaaagagattgccgagatgcaaaatgagactcaaaaagagattgctggcattcagtcggcgacttcacgccagaatacgaaagaccaggtatatgcacaaaatgagatgcttgcttatcaacagaaggagtctactgctcgcgttgcgtctattatggaaaacaccaatctttccaagcaacagcaggtttccgagattatgcgccaaatgcttactcaagctcaaacggctggtcagtattttaccaatgaccaaatcaaagaaatgactcgcaaggttagtgctgaggttgacttagttca

SEQ ID NO: 518 - DNA, 2869 bp, Butyricimonas faecihominis
agttatttaccttcttgcaaagttaggattttcttaaatgaatagtatggattttggaattaaattgttacgtttcaacgaagaaattttgagaaaatgtttaaataaaaaagcctcgtttcaaacgaggcttttttatatggctaaagcttaaattaaaatttcttctctttaatttttgctttctttccggtaagctcacggaagtagaaaattctggatctacgaacaacacctctcttgttcacctcgattgcatgaatgtaaggagaattgaaaggaatgatacgttctacgcccacgttaccagacatttttctaactgtaaaagtcttggtagttcctgttcccttaatttggataacaacacctttgaaaatctgaatacgttctttgtttccttctttaattttgtagtgtacgctaatggtatcacccgtgttgaatgaaggaatttcgatagcgttttcttgagcaaaagcctgttccgcaattttaattaagtccattgtctttattttaaaaagtttatttatcgaacgcagtattacgacttttgtcttttatgtaagagactacgtacgtttcaaaatcgagtggcaaaggtagaaaaataaatattccgatgcaagcatcggaatatttattttgtagtgtttattctaccacctcaagttttttacccgtctgttcgataatcattcggagataccattccggtaaagcaggctgctccactttcgggtttttctctcctgggattgcggttttcacgttaccatccatgaatttacagaacaggtagccgtagaaatctctccacgtgtccaccagatgatttcccgtgcgacaggaaaagtccgtgataaatttaatcgctgattctttgtcttgagctaacatctcttttgctccggcatcgatcatttggacgaaattcacgtattgttgttccagcgcaacttgttttgcacgaatttccgggtgaatcaagttatagcgtgtgtacgcgaagttcgttacttggttgaatacccagaaggctgctttattggtgaattccatcatgctgccgttaccaactgcgaaagcgaaaggtacttccgtggctgctgaatacatcgggaaatacacggaactggctgcatcatcaacaccaaaccaaaggattcctccgatttcatcgggtaaccaacttctacattgtgctacaaatgtgaatccggtttgttgggttgctgttgctctttcgtgaacatattccttcccgtctactttgaagctcatcggacgccatctgtacggacattcgtacggaccggctcccatatccttgctcatatccagttctgttccttccaggtgatcgcgcatgaaatccatcacttgcatcacgtctactttctcgctgggtttaatccataacggcatacggttggtcgcgtaacctttgctatcccgttgaatatttcttcccgtggcataatcccagtattgagccatgtccgggttcacggcattaaagaatgcccaaacacggatttcacaggcacgagccccgctgaagtcaactggagcgtaagtatcagagaaactgaaatctttatttttcccgtcttgaggatagaatcctttttctttcgcgaaagagatcacgtccttggaatacacggtggtgatattcggatcgtaaatcttattcattttgtcagaagagatagaagttttaccttctagcgggaaagttgtgatacgagcttggttcgcgtgggcggaaacatacccgtccggtaccatgcgtgcaacccaaacagctcctttttctccttctcccttaccgatgatttcgataatccatacttcgttcgggtcaatgatggagatagactctccactacttgcccaaccgtatttttcaatcaagtcggtcattattacaatggcctcacgggcatttttcgcacgttgtaacgtgatatatatagcactaccataatctataatagctcccgtttgggattccagttctttacgtcccccgaaagtggtttcggaaatagcgagctgatgctcgttcatgtttcctaccacgttgtacgtgtgggctacttgcgggattttacccataaatttaccggtgtcccactcgtagacatcgagcatacttccggcaggccagtcttgtgcgggccagtgatacaattctccgtataaaacgtgggagtcggcagaataagtgaccattgtcgacccgtctttcgttgctcctttcgtgaataaaaagttcgtgcaggccatcgtgtacgtggtgcagcaaactaacgctagtgtaaccagtaaatgtgcttttctcatttttagttattggtttatgattattttgataattatcgaattctgtcaaaagatttgagcaatttgatgtctttaagtattccccttatggccatgtatgtgaaaataatacagatcacgggtaatataaggctgaatttataaagaatctcggcgttcattttgtccgcgaattgattgatgtgataccacatcaagataatggcaccgatcaataggatgatctccacgatacataagcgcaactggaggaaacgttttttgaacaggaacacgttcactaagggaaccccgatcgtgaaaatattcatgattaacaaggcccagtagtgggcttgtagcacgctgttttctccaatgagaaccactccataagtaaaaaagttatagctcgcatcattcgggataagcaattgggcgatcggcacgtacaatggaatcgtcatgatgattgctaccacgagcaagtaaatagtttgaatcctttgaatcataattaataagtgattaacgt

SEQ ID NO: 519 - DNA, 2863 bp, Butyricimonas faecihominis
atattctttataaacaagtggtgaactcgcaagcgggattcctgtccgaagttgatcttgaaaacgggttgatctcgacaggaatattgattttataaactatataaaggaatagtcatttcagaatcagaaaacctgtccgaagttggaaattgatcttgaagtcagtttgtaatggtgatcgagttcgtggtgataagtgccgatctctttgtaaaatcttgttagagggcggttgctcgggaaaaaaatctacttgatgattaattggcttgaaagcgatagtaaacggggtattattcatcattcaaactcttaccagtttctcccaattctctagtacaaagatacttcaaaagataatctaaacctaacgtgtacctctcttttaagatgttttatgttagcacgtttcaaacaggttaaacgtcatgaaaacacgttttaaacaggataatcgtgcgtgaaacacgtttttgtcacgtttatcgtgcaaataacaggctaatgagaggataatcgtgaattatgattgtaatttaaaaaggattgaatacctttgcacttggaaggacgtttatgacgaagtagtcccagctatgaagtaaagcgtgtgttggggaatagaacgtgtggagggtctatttctcacttttggtcatctgtccacgattttatagcccattggctaggtggttagtgataaccattattaagatgacatacagcagttatattggagaattggtaaaaggtcgatagtcattagactcggctatatttgattaatttaaagatataattgacatggaaacatattcagagttccgaaaagtcgtggaagagctgatagcgactcaaaacaagttagctcaggttgaaaaggagttagaaaccttgaaatccaagcgtgaaagtaaacggagggcgaaccccgatagtgcttttaatagtgtcctgtctagtgctaggggacggttaagagcgcaggagggaacgcacgaagaacttgcacgtaaaataatattgaaagctctagttaagaacgggatgcccacaatcgagttcttcgtgaagtttgataaagctgttaagagattattagctttgaaaacttttaatgaagaatgcaagacattccgctattctttaacaccgagattcgtagctcaacacgtcgtgctagcaggcgaaaagctagtaaatgaagtgttcaagaatggactagagaacacgtttcatgagaaattgtatcggatgaacttcgccattttctcggaagatgaattgacaaggtatcagaatgatcctctttcaaaagaaactattgatgaacttgcagaggtttcttctgcggaatagtcaatacaaataaacagcctttccattgctggggttctttggaaaggctcatttattataaccgtttccccgaaattggagaaacggtattattgtttatagtaggttgctcattgcagcctccatttgcgtgttctcgaaactatcgaggtagatttgggttgtctttaaatcggtatgtcctaacatctcgctaattagagaaatgttgacacccgagttctttaatatcgtggcgaatgaatgccttgcgacgtatgttgtcatgtcggcttcgatttcgagttcagaagcgagaactttcaattcacgattgacctttgcgagtaccttgtgcaccctgttcttcttctgcacgggtgttttgtgtaccttggcgtcgaaaatcgggaacaagtaacgagcctttttctcgtgatacttgttgatgatctctctcgcttggtcgcatagtttcaattttatctccccgtgcgttttctgtcgtgtgtactttaacttcccgttacagatattatccaccgagaggttcgctatatctacaaacgatattccaccacacaagtaagagaacgtgaaaacatcacgggttaaggttcttaacttcgttgcgtttatggtttccgtgtagataattttcatcacctcttctttggaaatggctcttttcttggtcttcgtgttaaacttgctgaccttgtactcgtcgaaagggtaaaacttcttgttagcgacacctgcatcaatggctttgttatacgcacttcgtaacgttctgaattgtaaacttatggaggtttctttattccctttgtccttctgccattgctcgtacttttctagccattttttgttaatgttactgaaatagaaatctagcttgttcttggtaaacgctttcaaggagttaagtgaatccgtgtatatactagtgttacccgcctttccattctttttgaactcttcaattaactcggagtagaattctttcaccgttttaggcttaagttcctgttccgtgctttccaccaaagaggctgccgtgtattccttttgctcgacctttaattcaaggatttgcttgttgtactcggctatcttgtccgcaatgatcttgttaataagttctttattcggacacgttttcttcgggcagttctttgaaacgtcccacaagttcgggtgaatcgagataccgatgctcacgagtttacgtttaccatttttgtaaacacgaagcattaacgggtgttccccgtttgaaagtgtcttgtacttgtagtaaactactgaaatagaggttcccatgtcaaatttttggttgacgcctcggttgacaattactgttgaaaacccactaaaaccgctaaaaataaaaaagcacctacaatcgtaagtgctttaaaatgagagcggaaaacgggactcaaacccgcgacccccagcttggaaggctagtgctctatcgactgagctatttccgcgaataagtggggagagc

SEQ ID NO: 520 - DNA, 2860 bp, Butyricimonas faecihominis
tagttaaatttctcaaatttttgcgtttcatttattcattatacggaaacgatgattaacttagtttcattcccgcaaaaagatttcaacatttttatttgtgacaataaatgtacatctttgtccccgtttttaaaattcaagtcatgagaattaactcactgtattacaaacagaacatcaacatcgccttcccgatcatgctatcattagccggtcaggcgatcgtacaaatggcagataacatcatggtaggacaacttggtgccccagaattggcagccgtgtcattagcgggagcaattatcatgaacacgatggttgtcggcatggggattgccaccggcctaaccccacttgtgggccaagctcatgcgcttgatgataaagaacgtatagccggatttttccaaaattcacttctactgaacacaaccgtgtcactcgtactcacccttttcttgttcatgctcatgccctacctttccatgatgggacaacccgtggaagttgtagaattatgcaaaggatattatatcctgacctcattctcggtcatcccgttcattctgttcatgacattcaaacaatacatggaaggaattggaaacacgaaggtagccatggtgatcacgatttcatgcaatttgatgaatattttcctgaactacatatttatatatggtaaattcggtgcgccattccttggggtagcgggtgcgggactagcgacattaatctcccgcctgatgatgcctgttgctttttttctctacatccatcgttcccaaatatatagccccgtatttcgtttttttcaatttagcaacacgagccgtcgaaaaatcaaacaactattacaagttggctaccccatagccggacaaatggtcgtggaatttctatccctcagcctcatcacagtcatgatgggatggttaggcaccattgccctcgcggcaaatcaaattgtcatgtccatgatttcccttacattcatgatctccagcggaatcgccggagcctcaaccatacttgtcagtcatgaattcgggcgaggaaatatcgggaaaatgcgtcgttacgcccatgcttctctccgccttgccgttattttcatggccggagcagccgtgatctacgcctttttcgggacccccatcgcgtccattttcacccctgatcccgaggtgataaaagtagctcgcaacctattcttcgtggtcgccgtgtttgaaatcttcgacggattacaggtaactgcactcggagccttgcgaggtatcaccgatgtgcagcgtcccatgatctatgccctcgtatcctatctatttgtcgccgtaccgctagcatatattgccggcatcttgctcgacttcggggctcccggcctactctccggattctgtggcggcctcatgtttgctgccaccctcttcattcgtagattcaataaatcagtgagaaacattcgccagcagcgagttacaaacttatagattttagattaaaagattacgtgattgccgattgaatgattctataaccacctaatcggcaatcacgaaatcacagaataagcgcttgtctcgtgcggttgaactctaaaatcatgaatctaaaattagtaagggtttttaactttttttcttgtttatatcatgaataaaccgtaacttgcatcgtataaacaggtacgaattagatccatacaatcatgaaaatagaagtatataaaactaccgaagaaacgctacgctcaatgactgagactttgatagcggtgatcaaaaaaagcaaatcgaaaccttttcatatcgccctgtccggaggttctacggcgcaacaactcttcaaactatgggtaaaagaataccggaatgacattccttgggatattctccgcttttactgggtagatgaacgatgcgtgtcaccggaagatgacgagagcaatttcaagcatgcagaacgcctccttttcatgcccatggatattcctcaaaatcatatccatcgcatttggggagaacaagaacccaaaatcgaagctgaacgatattcggaaatggtgaaatgggaacttcccggctactcgaatatgccccgtttcgactgtactatactaggtatcgggactgacggacacgtggcctctattttcaacgattcaatgaatctactaaccgaccagcgaatttacgcggtttcacaccacccgaaaacgggacaacaacgcatcacaatgacaggaaccgtgattttaaaaagttctacgatattaattcccgttgtaggagctgacaaacaggagatcatggaacacctcgttcataaacagggagtatacccggcgtcctacatcttctctcatgcatcaacagcaaccctctttacagatcgggttacagaataaaaaaaggtggtttttcaaccaccttttctctatatctaggataccttagaatcttttctcgaaactacgaccaccaccgttactgcgacgatcacgaccgccaccgttacggttaaaaccaccgcgaccaccagccggacgatcggttctcggtttggcaacgttcacgttgataactttaccgtcatattcagcttgattcaattcatcaatagctttttgtccttgggtgtcatcagacatttccacgaatccgaaacctcttgatcttccggtttctctatccatgataacttttgctgaagaaacttcaccgtactcttcgaataactctcttaagtcactatcattcacgtcgtaacttaaatttgaaatgtaaatgttcattaatacaaactttaaaattaataatttaaatacttgaggtcggatattgtctagaaa

SEQ ID NO: 521 - DNA, 2858 bp, Butyricimonas faecihominis
ttatagaggaggtggcagcgaagctgacggaggagtttaatttaaaattataaatctaaaataaaaagaatggcatcaacgaactttgtcgattacgtgaaaatattctgtcgtagtggagccggggggccgggatctatgcatcttcatcgggataaacgttctgccaagggaggacctgatggtggtaatggtggacgcggaggacacgtgatattaaagggaaaccggaattactggaccttgattcacttgaaattccagcgccacgtgtatgcagaagacggggagagcgggagtgggaatttatgcacgggagctgacgggaaagatgtcattatagatgttccactgggaactgttgcccgggatgcggataccggggaaacgatttgcgagatcacgaaagacgaagagctttgtgttgctgtcaaaggggggcgtggtggtttgggtaactggaattttcgttcagctacaaatcagacgcctcgttacgcgcagccgggagaaccccgggtggaacggaatgttattctagagttaaaagtgcttgccgatgtcggattggtgggtttcccgaatgcgggtaagtcgacattgttatccgttgtttccgcggcaaaaccggagatcgcgaactatccgtttaccacgttggttccgaatttgggaattgtgaattacagggataaccgttcttttgtgatggctgatattcccggaatcattgagggggcgcatctgggaaaaggtttgggacttcgtttcttgcggcatattgaacgaaattctgtattgttgtttatggttccctcggatagtgaggatattcacggggagtataaaattttgttgaacgagctaaaacagtataatcccgagttgttggataaaaaacgacttctggctatcagtaaatcggattttattgataaggagctgatgtctgaaatggagaaagatttaccggatattccctacgtgttcatttcttccgtgacggggagtggaatcatggaattgaaagatatgctgtggagggtcttgaacgaagagtagcgaacggccttttcttattttatatttttttcaagtaaacggggtaaccgaatatgttaatcgccgtatattcataggaatttaaataaatgacttatgaattacggaattagtgtattgtttcgatttattcccttgttgatggcgttgatttgctttttctttggagggtatatttttggattcgggaatgatgaagcacggtgggtagcggggccggtcgtattttcattaggcgtactttgtattgcgttgtttgccacggcagccacgattattcggcaactgatccacacgtataaccctgttgcgaaatatttattacccggtatgggatatttattcgctttaggaacgatgatttggggtatttatctgttcagttctcctgaaccgcagaatttatttgtcccgggacacgtgatttgtggcgtgtcgttgatcgcggcttgtatttcaacggcagcaacttcatctactaaattcacacttattccggtgaattcacacgggacaagcgataaaattaatcctaacggtttctcggctacgacggaaacagtgttgatcgggttaaccgttttgttttccacggtagcgtgggtttgggcgatagtattattgtcaggctccgggggtgatcatttggttgccgggagcgtgatggccggattggcttgtatttgtacgagtttgatcgggctggttgcaagtatatctcgtcagatcaggaatgattatggcgagaaggatcggaagtattggccaagactggtgtttttcatggggacaatctgcatcgtggggggaattgttgagctgttggcagcacctgtccccgtgaatacaaccggttttattctgatcggtttaggtcttgtctgttttagtatttccagtaagattctgttattagccaaagtgtggcgtcaagagttcaagttggcgaatcgtatcccgttgattcccgtgatgactgccttgttggctctttttctgggcgcattcctttttgaagaatcgacggttgataatgcattttttgtgcctgcccgggtactgatcggtttgggaggtatttgtttctccctgttctcgattgtcagtattctggaaagcgggacttccagtaaataatatccctttggaggttttgatttgagtttatatttccgagtcgcgggaactcttttgggagagttttcgcgattctttgtttgtaatcttttaaaacgtggtagaattcgttattttcgcctccgaaataaaagaataaagtcatggctaaaaaagagaaggtacaggagatgtttaacgggatcgcaccgaagtacgatttgttgaatcatctgttgtctatgggtatagataagagctggcgtaagaaggcaatgaaagttgtcggtgcggggcgaaaggatttggtgttggatattgcttgcgggacgggagatttttcgatcgaggcgttgaaacatggagtgaaacgagtggtcggggccgatatttcggaaaatatgctggccgtggcacgggagaaagcgaaagcaaaggggttatctgatcagcttgattttcagtttggggatagcgagaacctcaccttcgactcgaatacttttgatgccgtgacagttgcttttggcgtgcgtaattttgaacatcttgaattaggactgacagaaatgtgtcgggtgctgaaacccgggggaaaggtggttattctagaattttcgacgcctgaacatttcccgatgaaacagttgtataatttttattttaaacatattctgcct

SEQ ID NO: 522 - DNA, 2853 bp, Butyricimonas faecihominis
tttccagcctaagtgtctcccgaaatttatagagaaaaacaacgaatcttttcttttttactccgtataaccaacaaatagtttacttttgtaatatgaaaacagaagatatagaaaaccagggcgagcaaaaatggaaaagcgtgaatcaattgctatcacgggcgggttcgcgcttaaatatcctagaagaagaaattgatgtagaagtacaacatcaatacatggatcttttggagcatctcatcaaaggtggagactttaaagcgttgagagaagacgcgatagtacacgtccaagatctatttgacgaggccgttgatgacgaaaagaaaaaaactttgttaatcctattgtccatggtcgacgacatttctatataccggagcattgaatcgttccagaaacaagataccccgatcaaaccgtgggcaaccatagcattgcaacaatcccggatgctgattcaatccaacctgctggacgaatcgaccgtgttcgtatccaccggtctgggtggtcacgacacgttgttacgttatttttgtgtctatgttgccaacaagggggtcacgctacaacctttccagtgggatattgcccaaaaagagacagaattggtcattaacaaaagccaaggagagattgaacaaatcgaacaattcgagaaatacatcacgtttacccttctgttaccaatcgaggctaacctgaaagagattttcaattcgattatagacgagtgtaacacttacgggaactttttaagcgaaaacatcatcatcacgaacgtgaaaaaactttccaccaaagagattgaggatttcttggaaactaaatcccctccaaagcacaaatcaagaccattctagtccagcatcaagcttatgaaaggactacattttttgaaataaggctccaactcgggaaaacgttccgggtggtagcctaaaagcaattgcgtcagttcctgcacggacacctccacctctacctgctttgcattatcacagacacaatcccctttcccgattacatatattcccgtgttttccggaatccagtcatccgttactttcagcacgagatcctgctccggattattcacggcatacaaacggagcatttgttccacgtccaacacacgtgccattccccggtgctcatccgcctttccggaaggaagtacacggcaatatatctccgccgcatccagatatttcatcactccccacaaagccacccgtttgacatcctcggagtcatacattccatccagtaccaaagcatgatttcctctcggttcggcaaaagctatcccaacaatatttttatcgctatacacgacaatcaatgcccctccatccattcgcaaactttccacgatcacctcaaaatcttcccgttcgtgcagcacgcaacaaggacgtaaacgcatcattgactgaaaataattaaacaagtcatccgttaacaaccccacctcccgaatagcttccacccgaaaatgatccgcaaccggtttatccaaaatcgtgtaatgttccggggtataatcaaaaacagtcgcgtaccccatctttccgtaataatcgtacaaccattcactggccggaattagggtactcacgggaatctttcttcctctcatcacgtagaaagcctcccgcagtaacttcgtcatcacaccccgggcccgggccaacggatgagtacaagcccccgaaatataccctgttacaatttgtgtcacgccaaaagtcatagggtaaagaggagtttgtaaagcagcaatagccgcaccttgttcatcccaatacaccagagcattctcctctttgtattttttgtcaaaatagaattgaatgaactcttccgtatcatcaaaacacaccctccataactccatgacttcccgtttcatcatactcgtatttaaattaaacagcctttgaaatgagagattttctcattttcaactttcaattaattcggcataccctttctccaataatatcaccggacgataagatagtttcgccttcctcaatcccggtattcccaaatcttcctcccggtttaggtaaacatattgttccgggatatgtcgtgcgaactcctgattcaaaatattatacgaaccgtcaatacgactatcggccttctcgatatgaacggcaaaggtatcatgattcaccggagcgccatacgtgaacccgacgatttcatcatccacccagagcgctcctccaaccaaaccaagagcatcaaaatttcgcaacgcaatattcagtgcttttcgctcgtttatcaaactctcctcttcctcacaatcatgctcttcacaccatttttcctctagttccaaacaatgcgggatcaaatctacggttaatggcgtgtacttgtaattataggtgcgtttgaacttattcacgtgattccgtttaggttgaaaatttttacctttcaattcagccagctcctgacgggaataaatataatcaaaataatcccgatccaaccgataatcaaaacttcccgggaactcccggttgaaccattcctccaactcaggaaaaactccatgtactcgtaaaacgtgcccttcggcctttgcttgctgtttcaacaattcgatcacattcttcacatccccggttcccacgggcatcgtgtacacgacactctcctcatccaatgtaaaacgcaccacgaggcaatcatcaaccacagcataatgactattggtcaagaactgccacgtgtacaagttcacaaacgaaagattgcaatcccggttcccacatgccaaaaaataagtcgttattaattctttatcctctattctga

SEQ ID NO: 523 - DNA, 2849 bp, Butyricimonas faecihominis
ctaaatatgaaatattgtgtctttaatgaatcttagctttcatgaaccagatttctttaaaggcaatgtttattcttaattttgcgtatttctccaaaatttggttatttcggtgagttccgcgcattcctaaatcaacggcaactcccaacatcaactcttggcgagccaagcgaagaggcatttgagttccgacggttacgccataagtgtttatgtcggtataattgaatctgagttgcgagcgagtgaaataggctccggccgtgtatttatttctttgccaccaataacgtccggtctcgttgggttgtaatgatcctccaatggctgctttatggtaatcttggaattcttgattcgttccgaattcttcgtaagctgacattctttggaatgtgtaatctcctgcaaatacccattttttattgtattgataggaagctccaacaatcattctgaaaggaaaaaatacctctccattgtcccagctttcgtcgttaacatttatgatggcaccgcttgtattactaattttattggcaacaaaagttctatttccatgcaatgatgttccaaaattaaaactacctccaagcgttagttctgattttttggttaatggtaaggggatttgaaagcctaatgtaaacaaactactattgatgcgagttaaggtttgtgatttaagatagtatccacttgtggcaggttgcatcacaagagttagacggtcttcaactttaccgaatacataagaggcatttacccccacggataatcgtcccaattgataagccactcctaaataagcctcgttcaatccacccaatccctctaattgctgtacataaaacatggtaggatcctctattaaaggataggaatagatcaaatcgaatccccggtctgatctctgtattaaacctagcgaaacgaatgtttttttgtatacccggaatgccatgtttagcgaggcattttgagccactttatagtttgaatgatctttataagtagaaacatcgacgtactctcctgtgacacccatttggaagtagaacctcattgaatctaatgccgtgtaagatgccgggtttaagaagttgatattataattatccctcatggcagcagaaactccccccattccagtataggctccgtagttatcaggtaataatccaactccgaatttggaataaggggtacccatattgttttgtccccatgctccgagggtaaaaagtaatattgcaatgcttgtaaatatttttttcatactcattgttataaacggcaataatttttttactaatagttcgcataataaattcgtaataccggggtcttgtcaacgataagcctttggaacgtgaggttgtttgctcccacgaatgtattgatttcatcgacaccgacttgtactgggctacctgctaaaccgattagtaaattaagttccggatctatacctccggtcccgttacttaccatactgttataataatccgtgatgtctattctatattttcggtcctctttgtagtttgggtttgtttcgagatacccgaataccgaattaccggataaatcggttaattttccggagattctggaatatttgtctaaagtgaatacctgaattgttgtaggctccgggatgtcttcaaagttgtcaattttgggttccaaaacaatttctacctttaagattgtccggtagggattcacatccgatttgaagggtaatttcatctttaacatgtacccgttctgaccttgaatgacagctttgttttcttgggtatatggtaaaggattgtaccaagaaacgttactaaaccgatcggatggtgtatgttcgatgttcgtgaatgcgtaatatcctccgctagagtaagcggccaaaggctgaaacgagtatgttccggtctttacatccagatgataatgacatgttaaagacaagcgtgaaccgtcaattggtaataaagccatattatccttgtccggaacgatcgttaaaccggcaaaataacgcatgaaatccaatgcattactctgatctagaattgaatcttgtcttcggatgaggctgaaaagttcccttcctagggcatcatctagcttgaaatacgcttctttatctctttgtgtgaaaaattgtttttccaacctgacgctcaacgtggctaacggggtctccggatcatatagaggcagggtttcattactgtaaatacagggatcgtcgaaatccgtaggcggaaaatttttcagccgatagactcggtaggtctgtaaagttgctgtatctcctgccaaaatctttgtttcgtcatatttaaatggaaaggcaagggtcaaagaatcgtaaacgtaattgtcatcataattcggaatcccggaattcccacttccgataagctggaaatagggagtggcagttgtaactcccgtggttttatcagtcattttccctaaagtgagctgattactttccaacattttagttaatatattaagacttgtaggaaatggattcaaacgaacggtggatgtctcaatgtcaaaagtttctatattcacgtaaccctcggcgggaaccatcgtatctccaatcgtgtttaggtcattgttgcatgaatatagagcgaataaaagacctgccagaaaaactattctcatgttataatctgttttgatttaatcaagatgcgaaggtataactattttctaaaatacggaagaacctgcggtcattttatctgaataaattgtaaaaaagaaaaacaatagatatttcgtcttttttttattggatttgtttttaaaatgtgtagttt

SEQ ID NO: 524 - DNA, 2818 bp, Butyricimonas faecihominis
gttttataaagatatcgttcatgctgggaatgatcttttgataagagatgatgtctgtttggggcaggactcttgacaaaagggtgtttgccgggcaataagtgttttgttgcaaaataatatcctgacggtctccttcgacacgttgagatactatctcgaattctgagccgattgtttgtgcgggtgagaattctgggttgtaacgacagctgagctggtatgtgttactggcatacttttcacgaatctgattgattggtccctcgatgatcttgcgtgatttgttgattaaggcgatatggctacagatttcttctaccgatcccatgttgtgtgtggaaaagatgatggttgttcctttcttgcgtaattcgagaatttcccgtttcagtaattcaacgttgatggggtcgaaaccgctaaagggttcgtcaaaaatcagcaattccggttcatgaagtaccgtggtgataaattgtactttttgtgccatacctttggatagttcttctacttttttatcccaccaagcttcaatctcgaatttctcgaaccacattttaagacggacgatcgcctcgtgtttactgattccttttaagcgagccaagtaaacggcttgttctccgactttcatttttttgtagagtcctcgctcttccggaaggtaaccaatccggttgacatcagacggttgcagatgttcatttctgaaaaatatttctcctgaatcaggggctgtgatttggttaataattcgaattaaggaagtttttccggctccattagggcctagtagcccgtagatggctccctccgggatattgattgacacgtcatccaatgccttgtggtttgcataggttttgacgatgttcaaggctttgaagaaactcataatcggatatttgtcaaaggctgccgaatcggcagcctttgaggttattttatttcaaacattaaagcgtctttcgggagtttatctcctttgttgacatggactttcgtgaccgtaccacttatgggagctaggattttattatgcattttcatggcttccaagagacaaagcaaatctcctgctttaacttcttgaccttcttttacatacaaatcgatgatagatcccggtatgtatgtgataacggctcccggatcgggtttttcccattgtttccgattaataaatttttcggtaaactgggttttatattttaagccgtcgatttctaataaatcgtattttggtgtactcatcgtggtataattttagtttaaaatggaggaattccatgttttttagccggggttaataccgacttgttgctggatacctcgatggagtgtttcaggatcttccgggtttcctcgggttcgatcacggaatcgatatagcctttagaggcggccacgtaaggattggcgaatttttcacgatattcggcaactttgattttacgcatttcttccggattttcggcagccataatctcttttttgaagatgatgttggcagcaccttccggtcccattactgcaatttcggcagttggccatgcgaacataaagtcagctttcaagtgacgtgagttcatagcgatataaccaccaccatatgcttttctaaggattacggtaatcttaggtactgtagcctcgctatatgcataaagaactttcgctccgtgacgaataacacccatatactcttgttcaacacccggtaagtatcccggcatatcctcgaatgttacgatcggaatattgaaggcatcgcagaatcggataaaacgtccggctttatcagaagagtcacagtctaacactccggcaagtacagaaggctgattagccacgaagccgatagtttccccgtcgatacgtccgaatccgacaacgatgtttttagcgaattcttgttgaatttccaagaagtctgaatcatcggcaacagcacggattacattgcgcacgtcataaggctgggttgggtcagacggaatgattttctcgatcttgtattccggtcttggcggtttggaggggaaaggtttagcttttgcctcgttactccagggaatgaatgtcaataattttttgatctgttcaaaacattcatactctgaatgagcgaagaaatgggcattaccactgatttcactgtgaactctagctcctccgagttcttccatagtcacgacttctcctaataccgtttttacaacttcaggtccggtaataaacattttggaaatgttgtctaccacgaacacgaagtcggtcaaggcgggagagtatacggctccaccagcgcaaggaccgaggattacagataattgaggaattactccggacgcttgggtgttacggaagaaaatttctccgtatccggctaaggagtcaacaccttcttgaatacgagctccaccagaatcgttgattccgatcaagggtactcgcatttttaaggcatgatccatgattttagtgattttacgagcatgcatcaaaccaagagaacctccggctacggtgaaatcttgcgcataaatacatacaggttctccatagattgttccggtaccaatgatgacaccatcaccatgaagaactttcttatccatatcaaaatctttggactgatgctcaacgaacatgtcgtactcatggaaagagtctttgtccaaaattgcttcaatacgctcccgggctgtcaattttcccattgcagcttgcttcttaatcgcctcttcgccacctccttgaagaacaatttcttttctctttcttaaatcaagaacatttcttttaagtg

SEQ ID NO: 525 - DNA, 2778 bp, Butyricimonas faecihominis
atacttacttttacaccgtaaaaacgaatatatgtcacataatatcacgatatacacagacggagccgccagcggcaaccccggaccgggaggctacggggtcgtactcatggccggaccgcatcgtaaagaactgtcggaaggctttcgccggaccacgaacaaccgcatggaattgctcgccgtcatcatcgggcttgccgccctgcgcttcgaaggaagcaacgtgaccatctactccgactcgaaatacgtggtcgatgccgttgaaaaaggttgggtattcggttgggaaaagaccggattcaagaaaaaaaagaacccagatctctggcgacaattcctcgccctttatcgcaaacaccgcgtgaaattcatttgggtaaaaggacacgccaatatcccggaaaacgaacgctgtgaccagctcgccgtggccgcctataaagccccgaacctgcaaatcgatgaatattatgaagcagaacagaattctgacgaacaactttttagtgaataggcaaaaaaaattgtcaattgttagtcaaggagattctaaaataactattttcgcgttacaatctaaaactagaaaaagtaacatcattcatcacaaaaacttatagagatgaaaaaaatattaatcgttggtgcagggggacaaatcggttccgaactggtaccccacttgagatccatttatggaaacaacaatgtagtggcagctgatattagtgctgaaaaatgtaaagcattggcagaagcaggtccattcgaggaattgaacgctcttgacggggaaggtttcagtgccatcgtgaaaaaatacaatattgacaccatcttcaacttggttgccctgttgtcagccacgggagaaaagaaccccaaactcgcttgggacatcaatattggtgctttaaccaactctctgtacattgccaaggataacaactgtgccgtgttcacgccgagttctatcggggctttcgggaacgataccccaaaagacaaaactccccaagacacgctgcaacgttccaacaccacgatttacggggtttgcaaggtaacaggcgagcttttaagcgactactacttcaaccgtttcggtgttgacacccgtagcgtgcgtttcccgggattgatttcatacgtgactctccccggtggtggaaccacggattatgccgtagagatctactacgacgccatacgcaaaggttcattcacctgtaacgtgaaagagggaacctacatggacatgatgtacatgccggatgccttaaacgcggttgtacaattaatggaagctgatcccagcaaattaaaacaccggaacagcttcaacatcgcatccatgagcttcgaacccgagcaaatcgcagccgaaatccgcaagcacctccccgacttcaagatggattaccagattgatccggtgaaacaagccatcgccaacagctggccaaacagcatggacgacacttgcgcccgcgaagaatggggctgggctccgaaattcgaccttaccagcatgacaaacgatatgttgatcaaggtgaaagaaaaattcgacaaaggattgatcaaataaagatacaacttcagagcaagaaaagcagcctttatcgggctgctttttttaataccttttgacacaccctcaagcggcccgcctgtacacgatttacagaagtttatacccgaattacggaacttcaaagtacaccgattatttttccgacaaaatatcttatttttgtgaatagctaataacgaacaacatggaagagattctgaaaataaacaacgtggacgactataacaagctctacggattggaaacccgccacccgttagtcagcatcgtcgatttatcacaagccactcgatggcccactcaagcggtttttaattacggcatctatgctcttttcctgaaagacgtcaaatgcggagacatccgctacggacggcaattctatgactatcaggacggcaccatcgtcagtttcggcccgggacagatcaccgggattgatatggcacccggggttcgccccattgcccacggactactgtttcatcccgacctgatccggggtacggcactcggacaagaaattcgtaactacacgtttttctcctacgaagtaaatgaagccctacatctctcggaggaggaacgccagaccatcatggattgcctgaataaaatacaggcagaactggaacacgccatcgataaacacagccgacggctgatcacggcgaacattggcgtgctattggattattgtctccgcttctatgaccgacaattcgttacccgtaaccagcaaaacaacgacatcatcgtccggttcgaacgcttgctggatgaatatttcgatggcccgatgccacaacaagaaggcctaccttcagtcaaatacttcgccgacaaggtctttctttccccaaattatttcggtgacatgatccgcaaacaaaccggaaaaacggcctcggaatacatccagaccaaggtcatcgaacgcgccaaggaaaacctactctcctcggacaaaacgatgagcgaaatcgcctacgatctaggattccaatatccccagcatttaagccggatgttcaaacgggtggccggatgcacacccaacgagttccgagcccaaaattgatcaaaaaaatgagtatcccgtaaatacaaaacgggtacccatcgggtcgttctccccacgacaaacattttaagtcccttatttaataatcatt

SEQ ID NO: 526 - DNA, 2758 bp, Butyricimonas faecihominis
caataaatagactatatttgtaatatgtttaaacgttggatttttgaatgtgggtatattaacgacattaaattcggcttgtttaaaatatgatttttttccataggattgatgatatatttattgtgcttgtaaaccataagattttcatttctaatttattggtgctaccagcataaggaatatgcgtatattttatgaagaatggaacaaggttttaagtcatcagccagcggctgatgatttggtgctgaatgaaaagttattgttaatgacaattcatcagccagtggcggatgaatttaattgggcagatttcctgtctatcggttttagccatcatacagaaattatcgcaaaagtgaagtctttggatgcgaggttgttctatatacatgaatgtgctattcgatattggaacaaatatactttaagagattatttgaaagctgatctttatcatcatcggggtgcattgcctaacaattttgcccaaacattacccgataagaaacaggcgattaaggctatttgttcttttaaggatgattatttgttggactttattaatatagaggaattagatgagcaggaagaggacattaatgaacgtgttatagaaaaagctattgtggccaacgtaaagaagtttattatgacctttgggcaggattttagctttataggcaatcaataccgtattgagacggcaggggaagaaatgttcattgatttgttatttttcaatcgggagcttaactctttagtggcggtcgaattgaagtctggaaaattccgtacttcgtatttagggcaactgaatacttacctttccgttttagattcatacgtgagaaaaccgcacgagaatccttctattggaataatactttgtagagaaatgaatcaaacctttgtagaatttgctgtgcgtgattataacaagccgatgggggttgccacttaccgtgcatctgaagatatgccagaacgacttcgcaaggcattaccggatatagaagaactgaagaaattattatagcattggatgagatctaccacagaataaatggtgaagctaaagtgaataaacccctcattcgtagaatatttgaagttcatacagagtttatacaatagagaatggatgagcaaaagatgatctctgaagaagcaacgaatcgggggtatgttctctttaggaactcgactatattacttcgaattctgggtttgtgagtatttaaattccatattttgcagttttttcctatttttgcgggaattcatactgaaaagataatacaaatgtacgaaacaatcatagaaagaataaaggagaggctggaaagcagagatttaaaggcggttatcattcctcacatatcaccggacggagatgctgccggttcatgttctgccctgtggcaagtgttggatcgggtgggaatacaggcacagttgatgacgtgtgattatatcccggattatttaaagtggttgaagcgtattccggatgcaatatcttttcagaatcggcctaaagaatgtaaacattggttacatcaagcggatatattgttcatgctagatcataataccgtggctagggaaggggatttggaacctttcgtgaaggagtttaaaggggaggttatcatgattgaccaccacccggatccggatgacgtgacgtaccggatttcggacacgagtgtttcctccacgtgtgaattactttataatgtaatctctagagtatggggtaaagaggtcatcgacacggatatagcgaatgctatctatactggaatttcaacagacacggggggattgagtcataattcttctcacccggaaacgtatcgtgtgattgccgatttgttggcactaggactgaataaagactacgtgcacgaacaactttatcaacgaaacacgctttcccggttacgtctgacggggaattgcctgttgaataagctaacgattgatgagcattttccggtagccacgattccgataacgtttcaggaattggaattatacaattataaagacggggatctggagggattggtaaacatacccttgtccatcgaggaagtactggtttctattcagattaccgagcgtaaagataaagtgaagttatccttccggtcaaagggcaatatccccgtgaacctgtgggcaaaagagtttttcaatggtgggggacatttaaatgccgccgggggacaaatgccgttgcctttggatgacgtggtgaagaaggtacgggacacggcggaatggttctttaaagcaattaaaaattgaaaattgaaaatggacaattattgctttacgagaaccgagaaaagatatatttgatgtataatcttgtaggaaagaaaatcattttcaattttcaattctgcattttcaattgatttgttatgccatttttaagatttcatgcagtagaaaaaagtagattggacttggtaggggagcgattgatctcggagattgttcgcaccttgggatgtccgagagagacagttgtaatagaagctattgactcttcttttatttctggacacgagcaatttcaggcttatccttttgtgaaggtggagtattttaagcgtccgttggaacagcagaatgcggtggcaaagattattttcgagtgtctgaaagagatcggatatccggaaagtgatgtctatttttcttttctggagaaggattgttactatgaaaacgggga

SEQ ID NO: 527 - DNA, 2753 bp, Butyricimonas faecihominis
attattaactttgtatcctaattcactaaaaaatggatttgagattaaaggaaatacttgcccaaagaggaattacactaaaagagttcgctcaaagttctggtattagccagtcaaatttgagcaattatctcaatggaaatatctcaccgactttagacactctaaagaaaatcgccacgaatttgaacgtggatgtggttgaactttttcgtgaaaaggatgaagttgagatttatgcaaagtatgatgggattttatatccaatcaacaaaagtgatattttagacataatttcaaaaaagagtaaataatgagcgtcaatcatatagaattaagcctagaggaaatccggcattatttagaagggtctaatataaacgtattcgtttttttagacaatacgaaagcaagtgaattctatattcgtacacaatttattcaagatgatgatttttcttggacaacaattgtgccatatatttatagaaggactggactcgagttaaagaacgaaaaggatattgcagattatttgaggtctgtcaaaaaatactttacaaaggattggatggattcttgggtaaaaaaagaaaaaaaagagtgtcttgcagacatagaggctaaaaaaaagcaaaatgcagacaaagaagcacgtgggaaaaaagcgagtgagatagttaccccgtacgtgttgcttcctctttttagcttgaaggaatgtaataataaaacagagttgcctccaaaccctaatctgcaaaggagattgcaatctttgaaggatagtggttacaccatagctatcgtacagtatggtagagaaaaaacaacaagtacgttgttgcctttccctaaatataaagaaatggggtatgaaacctttaccaaacagtttaaggcaagagtcatccgtctattaaaacaaagaaatgcttttgaagcaagagaaacatcagcaaaatccttaataccagaccataaattttcagaagtaagatgggacaaagaaaccaaagctgaaaattctatggaaatgacagatgcgcaaataatagaaaaattccaactcttggacaatcaaagaaatcaacaaaaacgtgaggtctgtagaaattgtttccagaaaggtataagaggtaccatatatggtattaattatttttatgaaggaacagaacgatgggatccccaaataccgactgtaggtaaagctgctgaaaaaggttgtaaaggttgtccttggtatgatattgaattatggcgtaaaatgattaataagaaagtgtaagtatgcccatacataattttggaagtgtttgttctggtattgaagctgcaagttttactcttacacctttaggagtaaatcccttgtggctatctgaaatagcagaatacccgaagagatttttagagctacaatacccggaacatccaaatcttggagatatgaccaatatccccgagatgattcaaaatgcccaaatcccgactccggacttattggtaggcggaaccccttgtcaagccttttctcttgctggatggcggaatggggtcaatgacgaaagaggtcaacttactcttaaatacattgatataattgatgctatagatgaaaaacgagaggaatgtggagaaggacgtgccgtctttttctgggaaaacgtggaaggtgcattaacggataaaaccaacgcatttggatgctttttagccggattggcaggccttgacgagcctgtaaaagtgtcaaaatttaaatcatcaggcattcttcatggtcctattagaaatatagcttggagagttcttgatgccaagtattttggcgtaccacaacaacgtaaaagggtttatgtattaggtggcggtcttgactttcatcccgaaaatgtcctattcgaaataggacatcaatttcaagacccttacaaattgcgagaacctcgccaacaagtagtaatgaatttatttggcgaacaagaaccagagataaatcaggatgtaattcgtgaacttcgtagagaaataaatggtcatgacattgaagttttcagatgttactctgactgcttatatgcagcatacggtacaaaatggaatggcaatgcggctgccttcaatggctctttgtttatttctcaaaatggtcgactaagacgccttactcctattgagtgtgaaagacttatgggttttcctgatgattatacagccattgctagccctcgtttaaccaatagatatcaagcaacaggaaattcttgggctgtacctgtaatcagatggataatgaacagattactggcagaggtaaatgataataaccatatagctcatattgaattaccaactccaagtattataaatgaaaattacactctatacttgcttgacgaattcacatatgttggaggacaatatctaaatgcatctacttcgtgctatgattttgttctaaccaatatgcttgacattgtagatactaacccagatgaaaaactttatatttcccaagctggatgtgcaggcattctaagaaggaaacgtgaacataatgcaggaatgaatccaagattagaagtcgtattaaagaactgctctcaataaagattacaaactatgagcaagaacgtctcaacggcaaattgaagaaataatacaaccgaatgatgataataaaatttcattcggctgtaaaaaaaaagttgtgtaacttcgcaacaaatctttatattctgtacatt

SEQ ID NO: 528 - DNA, 2744 bp, Butyricimonas faecihominis
agtgtggagtgtttaaaaattaagattgttaaaatttaagtgattctcatgtaaaaagagggattcgggtgaaacatacaatatgtttagtccgtatataacaccgtaaatattaaatatttcacggattagagagaaaaagaatgagaaggttataaatttttatttaaaggggagatttgattcgtttttgtaagtaaaataattaattcatgttaaatattaagttaaaatcgacttttgagtcaccctttttgctcctaaaggtgttatatgggtgtaagttcaaatttaagtatcaagtattatgttgaaaattgtattaatcgtaggtgttttattattcaatcttgttggagtgcaagctcacgagaaggagatggattcattggataatttagtgaagaagttcgaggcgaatcctgcggacccccaaacgacaattcaacttctgagagagttgaaaaaccaagggaagccgaatcgtgatgttgtgaacaggtattttcagactcagaaggaggcggattacttgaaggattataactggtcgattatccgggattacgtggatgatgtgaatgccccccagattaaatatttgtttaacaatcagtccaagttcatgcagaacttctcgaaggatgatgtgtttcagaagttggataacgtgtttgtcggtcatttggaacaatactacaacagtaacaagatcgagtataacaagtatctggatttcttgaagagtagcggttacgagcattatgacgtggtggctgactatttttacatcaagcaattgcgggcagagcgtaagtcagaagattatttctacaaggctagaaaattattccgttatttccccgagaacaggaaaatgatcaaggagatcaccgatggtgcgttggagatcatgaatgatgtttcccgtttgaaggtgattcaattgtgggcaggtaagaccgtcgagtcaaagaaagattttgatgccctttataattatgccttgatctctaacaaatgtggtttcgaggatgttgctaaaagatatgctaagatcgctacttctttggcagaagagtcttctaaccagaccatgatggagaaggcaaagaaattgttgcagttggtaaactagaatttgtaacaaaaatatagcagggggtgatcgtcatgattactccctttttttgtatcttcgcaatctgaacagataaaattgaaaatggaaaagaaaggtttgattgttgccgttgatggccattcttctacgggaaaaagcacggtatccaaaatactggctgcacgtttggggtacacgtatattgacacgggagccatgtaccggatcgtgacgttgaaagcaatgcgtgaaggattaatccgaaacgggaacgtggatgatgaaaaattgaaagaagttcttccgacaattattttcggttttaaatataacgaggaaaaaaaacgttatgaatcttacatgaatggcgagtatgtagagatggccattcgcggattagaggtttctgataacgtgagtttgatagctgcgttgccttacgtgcgggagttgcttgttgagaaacaacgggagatggcaaaagagggtggtgtaatcatggatggacgggatattgggagtgtcgtgttccctcatgcggaggtgaagttctttatgacggcaagtcctgaagtacgggctcaacgacgttacaaggaactgatcgagaagggggagcaggtgacttatgaagaagtggaggcgaatgtccggaaacgggattatatagatgaacaccgggaaacaagtcctttggtgagaacgtcggatgctgtgttgattgataatggcgatatgaccgtggaggaagaagtggaagagatgttaaagatcattcgttcgaaatatgaaagtagaaattgacgaaaattccggtttctgttttggggttgtgaatgcgattgccaaggcggaggaagagttgcaacatggaagattatattgcataggagatattgtgcataatagtttggaggtggagcgattaaaacaactgggattaagtacgatagatcatgatgagtttgcccggttgaaggcgtgtcgtgtgttgttccgggctcatggtgaaccaccgagttcatacgaactggcaaagaagaacgggattgaggtgatcgatgcctcgtgtcccgtggtattgaatttgcagaagaaaatacgagaggcatacgaggaggtgagagcgagcggggggcagatcgtgatttatggaaaaagagggcatgccgaggtgaacgggttggtggctcaaacgaatgatgaggcgctgattatcgagcaagaggaagatttgaaatccattgatttttctcgtccggtaatcctgttttcccaaacaaccaagagtttggatggtttcaagcgtgtcgtggagttggtgaaggagaatgcgagggcctccgtggtagtaaacgatacaatctgccgcaaggtggcgaatcgaatcccgcagttgaaagattttgcagcaagacatgatgtgatcttgtttgttagcggggaaaagagttccaacgggaagcaacttttcgaggtttgtcgggaggtgaattcccggacttattttgtgcagggggtgaaagacctgcgtgatgagatgtttgataaagctgtgagcgttgggatcagtggagctacttcaacaccgaggtgggtgatggaagagataaaggagggg

SEQ ID NO: 529 - DNA, 2735 bp, Butyricimonas faecihominis
atttataagttcttgtccttgtacatattttcccaccaagcgggttcacctttcaggtatttggcaaaataagccatgatggtgttaccccagatgattcgttggttgtaatccacgacggcatgatctgcattcttgattaatacgagttccacgtctttgcccaagagtttcagcgcggtgtagaactggatactttcacccgtgggtacgtttacatcggccgtaccgtgcaacaaaagcatgggggtttttaccttgtcagcgttgaatagcgggctttgatccacgtagatgtcctttcgattccacgggaaagcatgagccgatgcgttcgtgctgtaactatatccccagtagccttcaccccagtaactggaaatggaggaaattccggcatgtgaaatggcacaagcgaagatgtccgtgcgggtttgcaggtacatggttgtgaatccaccgtaagaggctcccatgcatccgacacgttgtgcatccacgaaaggatgtgctttcaagaatgctttcgtgcaggcaatgatttcgtctgccgtgattttaccccagttgttttgatgacgggctgaaaattcttgtccgaacccggtcgcaccagagggttgcatcacatatacaatatatccattcgcagcgtatagattgaatggccatcttcctccgaaagtcctttctaccggggttgttcccccgtagtaatacacgatcatcgggtattttttcttgggatcgaaatttgccggaagataatagcgtccgtctatcgtggttcctttcttgtaattgtagtcccagtcttttacttgtccgaattctatatttttgtattgttcaccttgcggatcggcccattcctgtgcattgagggttgccaagtccaaggtatagacccgcgtcgggtaactctcgtctgaggcagtgtagatcccggtatttccgttttgagccaaactgatcttttgtacgagatcacccggacattctattctcgtgattttcccgtctttcccataccggaacaagtaaacgtaatcggtatccccggccacgatataaatattcccgtcggtatgccagatgtagttggagactgcaggattgaaatcttttgtaatcggagttacttctttggaatttaagtcataaatgtatagctgcgtgtcgtatccgttcacgatctgtcctttagcaatctttaccccgatttgtccgaaagcgtcagccgctccggcaattaataattttgaatcatcgggagaaaagacacattgaatgtcaaccagacggtctttccaaagcgtgtcaagttgattcgtgcgggcattcaacaggtagacagattgtttccggtacgggtattcgttataatccggtcgtccggtgctgattaaaatttggttaccatcgtgactgatgtccatgatggaagtcgtttggtttccccaagttaagcgagtatgtatgcccgttgccaaatcatatttgcataagaaataccgattgcgataataagcctgtcgatcttcgatcccgtcgagtttgcggagttcccattctttcggggtgtaattctcatttttgtaatagataagataactccggtccggtgaccacgagaaagaactgatcgtctgatcgtcccggaacaagcgttccatcttttgttgttcgatgtcgtaggtgtatagggagtttcccgttccttcttttatcaggtaagacaacttgtcttctccgggtatccaagtcaagttactgacattgttgccgtagaacgtgtacacgatctctttgtcagcaattctgtacacgttcgttatggaactgcttttaccttttataatctcaccttctgccatgatcaggtattttccgctgggagaaacctgaattcctccgattctgggaccgttcagcacgtccagtatatttttcccacgtttgggggataaggtaaattccaccggggtatccttgaaatcgggatctgcaataaattgagctgaaaatagtttgtcgctttctttcgtttgcaaacttttcacgatgatggagtgttttcccggaacccattgcagggtacattcttggtttactgcttcggttcccttgtggctggtatacgtgatttttttcactccatccacgtaaacttcggcattcccataaaatgaaaattgcagtttcccgctcatccattgcgtgttttcgacgtaaacggcatataatccgattgccggaacgatacttttattttgggaaataacaatgttatcattcacggttgcagtttcccaagtgagagagtgatattgtagttcttgttcgcccacggcaggggttaggttttcgatattaaacgtggaaagagttaataaatccgcttgggaaaatattttgttttccacgtttttcatgtccccgaaagccggaaactctaccgggacgggaggtaatcccatccattccctgactgtctgcccgtgtaactgcatggtacagatcagcatgaataaaaataatagttttctcattttattgtgttttgatcatttgaattctctttcgcgaaaatatggattatattttaacttgtaaccctgttgattgtatcttttggcttgttataaatttctttcttgtctgtctcttatacacatctccgagcccacgagacttggctgaatctcgtatgccgtcttctgcttgaaaaaaaa

SEQ ID NO: 530 - DNA, 2728 bp, Butyricimonas faecihominis
ttgatgtattagcgacaaaagaatatattaatttaaaataatttatgaaagcttgtttcatggggttaggctatattggtctgcccacagcaattattgctgcaaaacacggtattaaggttaccggggtggatataaatcctagtgttgtcgagttaacaaatcaagggaaactccatatcgtggaaccgggattggaggcatatttacaagaagtcgtaaaaacagggaatttaaaagcttctctgaagccggaggcttgtgaggcttattttatggttgttcccactccttttaaaggaaatcatgagccggatatttcttacgtggaggctgccactcgctctgtattacctttattaaaagctggtgacttgtatgtgatagagtccacttcccccattggaacaacagaaaaaatgagagatttgatttatggtgaacgaccggaattaaaagataaaatatatatagcttattgcccggaacgagtattaccaggaaacgtgatttatgaattagtacataatgaccgggtgattgggggaattgatgaagagtcaacaaataaggctattgagttttattcacaatttgttcaaggaaccttacatagaacaaatgctcgtacagctgaaatgtgtaaattgacagaaaattcttctcgggatgtgcagattgcttttgcaaatgagttatccttgatttgtgataaagcgggaataaacgtgtgggaattgattaacttggcaaacaagcatcctcgtgtaaatatccttcaacccggttgtggtgtagggggacattgtatagctgttgatccttactttattacagcggatttcccgatggaatctaaaattatagctaatgcccgggaaataaataattacaaggcattctggtgtgcggaaaaagtacaaaacgagatgttgaaattcgagttaaagcatcatcgtaaaccgatcattgccatgatgggtttagctttcaaaccgaatattgatgacttgcgggagtctcctgcaaaatatattacaaccaaggtgatgcagtcctgtagtaatgcagatattcttgtcgttgaacctaacgtgcaagaacataaagtgtttaaattgactgattacaaggaagcttatgaccgggcagatattgtcgtgatgttggtcgctcatgacgtgttcaagactttgtcatggacagatcagaaggtgattcttgatttttgtggtatttacaaaaaatagattgttttgatgaaaaaaataatgttagtttttggaactcgtccggaagcgattaaaatggctcctctagtgaaggaattccaaaaatatccggaacaatttcaaacaattgtttgcgtgacgggacagcatcgggaaatgttagatcaagtacttcatatattcgagattacacctgataatgatttgaatatcatgaaacaaggacaggatttatatgatgtgacggcacgggttttaacaggaatgcgtgatgttttaaaagaagctaatcctgacattgttttagtacatggagatactacaacgtcaatggctgcggctttggctgcattttatcaacagataccggtgggtcacgtagaggcaggtttacgtactcatgatatttatagcccttggccggaggagatgaatcgtcagataacaggacgaatcgcaacttaccatttttcaccgacgcctttaagtcgtcaaaatttgttagatgaaggtgtttgtgatgaaaaaattacggtaacagggaacacggttattgatgccttgtatatggtagtagaacggataaaaaatgataaaacattagatttagagttgaattgttctttgatcaatgctgggtataatgtagatcgtttaaatgcaggtaagagattggtattgataactgggcacagaagagagaattttggcgagggttttattaatatttgtaaagcaataaaagcattagttgaaaaatttccagatgtggattttgtttatccgatgcatttgaatcctaatgtgagaaagccaatacatgaaatgtttggaaaaggtttatcgaatttgaaaaatatgttttttattgagccattggaatatttgtcgtttgtttttctaatggaaaaatcaacaattgtgttgaccgatagtggtggaattcaggaagaagctccgggattaggaaaacctgttttagttatgcgaaatactacggagcgtccggaggcattggaggcgggaactgtgaaattggttggaacggattttaataggattgtagaggaagtttctcgtttattggaagatcaaggttattatggtgtgatgagtgaagcagtgaatccttatggagatggaaaggcatgtgagaggattgtttatcaattaaaaaatacaagataattatcttagatggttgaatctctaaagaataaaaccgtaaaaggggttgtttggagcagtgtggaacgttttgccgtagcaggattacaatttgtgattatgattattatggctagagtccttacaccagaagattatggcttggttgcaatgttgcaaatatttattgcagtgtctcaatctttaatagatagtggtttttcgcaagctttaattcgaaaattagatcggacacaggcagattattctacagtattttattttaatattggggttggcttctttttatatatggtattgtttgttgc

SEQ ID NO: 531 - DNA, 2712 bp, Butyricimonas faecihominis
aaataatctgaatctgttaaatatttattaagatttcgatagaaaggtaatctttggaaggatataattaatttcgctttcacaaagaccaatagaacaaatttaaaggaataaatgatgatcaaatgttttttatggttcgtaccctgctttttcgtgctggccgggttcgcgcagaaagctaattacaaagaagccgaacgttttatgcgtgggaacgcggaaaaactggtaggatcaacgaaagtaagtcctcgttttttgaaggaaagcgataagttttggtatagttacaaaacgggcgatggaacccgttattatttcgttgacccgaaggcgaagattcaccgggagttattcgatcgggaatttatgactgccgagatcagcaagtatacccacggaccggtgaattacaaagaactacccgtgcgggcattggcttttaaggaagatgagaagacattgaagttcgaggtggatactttccgtttcgagtataacatttataccaatcggttggtgaaaatagattctgcccgaaagaaaccggatacaactcccaagaaatcgaacgggttggtggggacgtattctccggatagtacttatatcgtttacgcgaaaagtcataacctgtatatgctttccgtgaaagattccgtggaaacccagatcacgacggatgggacattgaaatattcttatgcatacgatgatacggataccacgagtaaacgggagtctgcccgggtgacttggttcgaaaattctgaacgtttttacgtgcgtcgctcggaccggagaaagattaaaacgctttatgtggttaataatttgagttcccgtccgacgttgaacgagtatgagtacgtgatggccggggatcaggaggtgcaacacgaggaattattcttggtggacacgaccgataagaaattgatcaaagtgccggttgagaaatggccggatcagacgttgagattgtttaccccgggaaaaaaggtcaacagtctttatttcctgcgcaaaaagagaacctgtgacgagatcgatttttgtaaggtggatttgaaaacgggggaggtgaaggtgttgattaacgagattagtaagccttatttcaataatgatttcttccatctttccttgttgaacgagggggaagatattatctggtggtcggagagaacaggtcacgggcatttctatcattacgatggcgagggaaatctgaagaacgcgattacggccggaaattggacggccgggaagatggttaagattgataccgtgggacgtaccatttatttcggggcttacgggcaggagaagggagcgtgtccctactatgcccgggtgaataaagcccggattgacgggaatggtcaagtggaggtgctgactcccgaacaggccactcatgaggcttatttttcgaagtcgggacgttatttcgtagataattattcccgtgcggacttggaaccccggagcgtgttgcgggataacaagggaaaagtgattctggaattggcatcacccgatttgacccggctttacgagacgggatggaagatgccggagcctttcactgtgaaggctgccgatgggcatacggatttgtacggttttatgtggaagccttttgacttcgattcaacccggcgttacccgattatttcgtatgtttatcccgggccgcaaactgaggcgattccgttggagttttccgtgacggcagcttataatgttggtctagcacaagtcggtttcgtggtggtaactttcggtcaccggggaggtagcccgatgcgggataaatggtatcacacgttcgggtataataatttgagggattacccgttggcggatgataagtgtggtatcgaacagttggctgatcgtttttcttttattgataagtccaaggtgggtattttcggacattccggtggaggtttcatgtctaccgcggcattatgtacttatcccgatttctacacggcggctgtttcgtcggcaggaaatcatgacaataatatttataaccaatggtggggagagacgcatcacggggttcgggaggttaaatctttcgagaagaaaaccgtgaaagattccatcacggggaaagataccacgatttccgtggagaagatcaagttcgagacgaaaatcccgacgaatatcgagctggcgaagaatttgaaagggtatttgatgctggtgaccggtgacgtggataataacgtgcatccggcgaacaccttgcgtatggcagatgcgttgttgaaagcgggaaagaattttgacttggtgattttaccgggacaagctcacggttttatgggcatacaacaggctttctatcaacggaagatgtggttccactttgcgaaacacttgctgggggattattcgtccgatcagttccgggagattgatgcttatatgcggttgtgaggcaaatgctaacgccttgattttattacacagattataggattagaaataattcccgaagagggagagttacccagctctccctctgtttatagagggagtacccgaaggggaagggagtttctgtaaataagttgattacattgaaatgaacccctccgtcacttcatgctatattatcccgttggctatgtagtttcctaaaattggtttactagatttgacattcaataaattgtataaagc

SEQ ID NO: 532 - DNA, 2709 bp, Butyricimonas faecihominis
gttatgaggttattttattattgtattttactattttcgctagtaacattgggaggttgcatcaatgatgcagatcctgttgatgatccgtcgggcaatccttctgttgttgtgacggatgggaatgtgatgttttcatttaccgtgccggaaacctcctcttctcttggacgggcttccgctgaaagttcggatgagaccgtgccgggaagcgaaaacgagtcaagaattgaaaaagtgcaactctatttatttcattcggaaactaaaaatttcatagagtctttcgagatcggggtagagcgggtggtatctgaccaaaccgtaacttaccgttccaaccaaaaaatcaaggttgatccggggagttatgatgtatttgccgtggctaaccggactagtatgattaatgccacttccgtggataattttttaagccatgtcgataaggattcttacgagaatggaacaacagatgcttctcgtccgttgattatggccaatcgtgccgtggccaatttgaacgtggtggtgaatactccgaaagcggaagaagagattacggtggtacccatcaccttggaacgagtagtagccaaattgtgcttggcaagaaaccggaacgaatatgttatgaaggacaaggaaggccggcaatatgccacgataaatttaagtaattaccgttatttcaacttgagccggaatttctatactttccgtcacgtggttactttagcggacggatcggatgatacgaatctggttaagcccgatttcacctgtacgaatgattattttggggttattcctgccacgaacggctatgccgtagacccttattttttcaataaaacggtggccggggcagagaatttcacgaatcaagacaattactatgcccaaccgtattgtgaaaatgcaagtaataatatcacgagtgtgttgaatgctgaaaacacatacacgacaacgtattgtttggaaaactgtatgtatcgtccggcacagaataaagcctacgccacgggaatcgtgtttaaggcaagtgtttccataccggaagagagaacttttaatgaagaagggcacacggtagatccttacgggcaaagtacgatctattattttaactataatttttatacctcgttgaaagccgtgcatgatatcggtaaggcgaatgtcccaacggatggttcattaagcctcgaagatcagaaaaaatacaatatcaaggtgtttaacaagagtgaagaaggcagtttccactgttattacaactatttcattcgccacgtggataatcattcggcaatgatgggtgtgatggaatttggtatcgtgcgtaataatatttaccggatattgatcacgaatgtgaatgatctgggaacaggaatccctgacgtggatccgggggatattgaatccgatgcttacctaagtgttgatttctctgttttaccttggaatatccgttaccaagaaggtgagttggaatagaatgatacaataatttttagctgtaataatgatgagtaagattggcgcatgctggttggcaatattttcttgtctttgctttgcttgttcatgggtagatgacgatctctccgattgtccttcgggtttttggttaaaattgtcttatagatataacatattaaacgtggatgcggcttttacccaattaaaaaatgcgtcaatattcatattcgatgagaccggaaattatattgaaacccggcatgtcgacagtcttattcttcatcaaaataattgtcaggtgaggttggaatccttatccccgggcaaatataattttttagtttggtccgggttgacggattcttgttacgaatgttctgcctcgggggtaagactgttatgtgatgcgtcgggaacgtcatccaaacaattacccgctttgttccatggccgtttggaaggggtggaagttccggaagagtacacggttcgggaagtcccgttgataaagttaacccaccgtttcacgtgtgttttgcaaggccagaatccgacaccatttgcagatgatgaatttctgctggaaattagggcatttaatgggatgattgaccatcgaagccagccgtttgattcggttgaaacgtgttacttgcctttttatcagacggtagccgacttgtccgggttgcaggtcgtgcattcggaattaaatacattacgtctgcttgaaaatgatgatacccgtttgattctgacccatcgtttcacggggcaacgcgtattggatatccctctcacgaaatacttgcttctctctcgtgaggcttactcgggaatgaccccgcaggaatacttggataggcaggatcaatatactttaatattttttttagatgccacagaggataaattaaaaccttatatctgtcccctgatgaaagtcaataactggatggtacggataaatgacgtggatttggagtcttaaataataccaagcttacaccaaggtaaggaaatctttggtttaagggtggactatggttgctctacctcaagtacaaaacatgaacatagcatagacatagcatgaacatgaaatagtgttgatgctgggtttttgttgtgcctgtgtttggggtatgggctagagagggggtagggcaacgtttatgtaagtatggataagggttaaattgcagatatgtataaggg

SEQ ID NO: 533 - DNA, 2709 bp, Butyricimonas faecihominis
ttatatggctgtgcaaacgtatttatcaacaaaaaataataatatccccttaaagccaatgcctgacctctctgattcaatttttcattctcatctccagtaacatcatccagcatatcaagtacaacattgcatccttttattttggaatacaatttttcccaagtatctattccagtcgtatacaactcttccatcttatcaaacatatcaacatcccatgtaaatacaggcaatccttgctgcaacacagtaacatggctttcattgtcactataagcattttgtacattatctgtcaaaagctctaaataaggatatatacaatcggttctcagatatccctctcctaataataattgttctaaatctgaaactgtacttgggcgtacttcatcttgactagactcttccaaaaaatcaccacatcccattattccgatgctaagagccataaaaatcaaacaataaaaaaaacttttcatatcgtctatcattataaactaacattaataccaaatgaatacgtacgagatattggttgtgaaccagttgcaacttccgggtccatccctttaaattctttactaacaattataaacggattacttacagaagcactaaacgataaatttttcaaatacatctttttcacccatttctctggaagcgtataatttaaagataaagcattacaacgtaaaaaagaagcattcacaacccgtacatccgagtagttatataaacgaggagcatattcagaagcaccattcggcaatttgtaatacgaagcctccgttgaagataatgctggaatatctgtaaacgcctcatcaccgggctttctccatcttttggtcaattccttaggcaaattaacgtaagcacttggagttgaagtcacgattgattcatcaaacacttcatacaaaaacttctttccacctatttgcagattaaacgatgaagatagtgataaactcttataacggaatgacatagaaacacctccggtaaagtcaggttccaacgttcccatatatttcataaaagtagtagcatccgtttgtcctgccggattttcttccacagaaggaatattaaactctgccgaccctgtctttggatttaagccactaaaatcaaatgcccagaaagaagatactgcatatccggctttgtttagacttccactagcagccgctctccaattttcattttcatttacagttgactttacttcattaaaatttttagaagagtttatagacatactccatgtaaaattatttgtacgaacaggagtaaatccaacagaaacctcaataccttgattcgtcatacttccaccattaattggcatcgaggtaactccataagcataaggaacctctttttctacgatcatatcttcggttttcttattatagtattctattgtccatgtaattttattttggaataatccaaagtctgtacctaaattaattgttttcgttttttcccagcgcaaattaccataaggcaacgatttaataaacatcatgtattcacctgttcggttttgatctatcgtctctgttccacttccgatccgagcaattaaatctggtccataattttctgccacatttccttgccagccgtaactaactctaaaatttaaatcgctaatcacttgctgattttgcatccaaggttcataatgtacattccaacgtcctccaatagaccatacaggtaagaaacgatttcttgtatcttgaccaaatctattagaagcatctgaacggaagctcgctgttaatatatatctttcatcaaatccataagtgaaactagcaaaataaccgatataattagatttacgatccgttactactgttgtatatttatctaataaatcattacgccgatcttctccattttgatcttttattattgttggaggcaaagaaactgattttcctcgtcctgggaaataaccataaatagtagacgcaactccatcatatttattacttcgacattcctgacctaccatcaaactaaaacgatgtttttctgcaagaacatagttataagataatgtattcctccaggtataattgaaattacgatcctccgtagtattcaactcacccccatgaggtaacggagaacgttgatacaaattatctgcaggacgttgcgtaccaaattcatactttctgatttccgtaatataatgactttgttcatcagcataagattctcctacaatattagaggtattcaatccaaaagtactttcaaattgcaaaccggttaaaatatcccaacggaaactagctgaaacacccatactacgattggtatttgtatttcccgtcatagatatttcatgcaatatattatatagataaccgctcttatctttataaaaaaacttttcaccattttcaaaacaaggaatgactctacttgttgttgaagcataattataaggatcgacttgataataaccatctgtttccgaagttgaaccgtttattctcaaccccaaattaaccttctctccaaactttgcatttattccaatagcagcactatatgacgtactttcatttcctattgatgttcctctattgattgtagcatttactgaaccataataactaatcttatctgttcctccagagatacttaaactatgattcatacttacac

SEQ ID NO: 534 - DNA, 2691 bp, Butyricimonas faecihominis
atataaaaataatagtaaaatgatattttaatatcagttttataatctctttcacatcactatcttataaggaatgagaacctgtccacgttctttaatgcaattcccgtacctctggccacggctcgcaatggatcttcagcaatatggaatggaatgttcagcttgtcggtcaaacgtttatccaacccgcgcaacaatgcaccaccaccggccaagtatattcctttgttcacaatgtctgcatacaactcgggaggcgtctgttccaaagcggccaagattgcaatttcaattttagaaatggatttctctatacaatgagctatctcctgataggaaacaggtacttcaaccggaagagaagtcatctgattcggtccttgcaccacgaagtcggcaggaggttcatccagttcggacaaagctgaaccgacatgaattttaatttcttctgctgtacgttccccaatcttgatattgtgttgatgtctcatgtattcctgaatatcatccgtcaagtcatcacccgcaatacggatggacttattcgtaacgatacctcccaaagaaatcacggcgatctccgtggtaccaccacctatatccacgatcatgttaccttccggggcttccacgtccaagccgatacccaaagcggcagccatcggctcgtaaatcatatagacatcacgtcctccggcgtgttcggcagagtctcgtacggcacgtagttcaacctctgtacttccggaaggtatgcaaaccacaatacgcaaagaaggagagaagaacttgctctttccgtttgccatcttgatcataccccgaatcatttgttctgcagcgttaaagtccgcgatcacaccatctctcaacgggcgaatggtctttatatactcgtgtgtcttaccctgcatttggcgagctctctcaccaatagcaattaccttctctgtttttttatcgacggcaacaatggatggctcgtttacaaccatcttgtcattcatgatgatgatcgtgttcgccgtccccaagtcgatcgctatatcttgtgttaaaaaagaaaacaaacccataatcaattaatgtttgaagtgtctcattccagtaaaaatcatcgcaatattatacttgttggccgcatcaatcgaatcctgatcatggatagatccgcccggttgaatgatcgcggtgatgccggctttgtgggcagcctcaacacaatcagcgaaagggaagaaggcatccgatgccatcacgctccccgcaattcgctccccgccttgacgaatggcattttccaatgcccagattcggcttacttgtcccggaccaactcccgtggtgcatttgtcttttgcaatcgcaattgcattagatttagtatgcttgacaactttccatgcaaacaacaagtcttctagttctttttccgaaggacgacgattggtaacgtatttcaattcaccatcaagcaactgttggtccatatcttgaatcaacagacctcccaatacggtttttgctttgggagaagtataatctcttttactaatatttgatacctgtaataatctcagatttttctttttggtaagaattgctaaagcttcttccgagaaagaaggagctacaatcacttccaagaaaataggggacatgacttctgccgtagccttatctacttcccggtttaccgcgatgattccaccaaaaatagaaacaggatcagcctcgtaagctttcttgaaggcctcagcaagagtagcggcactaccaacaccacaaggatttgcgtgttttgcagctacaactgtcggttcttcgaactctttcaaggtttctaaagccccgtcggtgtcaccgatattattataagataattctttgccatgtaactgaaccgccccggtcaacgtaccctctgtctcctgaatttgggtatagaaagtagctgactggtgtggattttctccataacgaagatcttgtttcttttcgaacgttaaggtcaaggtcttcggggattgtatattcaatcgtttagagaaatagttggctattagagcatcatagtgtgaagtatgaataaacactttagctgctaatagctctttggtttcaagtgaagtatctccatgagcttgaatttcctcgattactttcgtgtaatcttccggatctgtaatcaccgtcacgaaaggataattcttcgctgccgcccgaatcatagtcggcccgccaatatcgatattctcgataatttcttcgtgtgaaactcctgttttaagaatggtttccttgaaaggatatagattacaaacgaccatatcaataggttcaatcccaagttcggccatctgttgcttatgtttctcgttgtctcgtatcgctaagatacctccctcaacattcgggtgaagggttttcactcttccgtcaaaacactcggggaattgggttaaatctgaaatatctttcacctgtagtccctcttctttcaatttcttagaggttcccccagtagaaataatctcccaacccatagaatttagcgatttagcaaaatcaacaatcccacttttgtcaaatacactgattaatgctcttttcgttctcatccggatatttaatttttattgttccaaacgtaatattacttgcagacaaaggtaaaaaaagaat

SEQ ID NO: 535 - DNA, 2684 bp, Butyricimonas faecihominis
gtctaaagcttaaatcaaacataccctattatgaaacaattaatcgcctgttgtggattagattgcgaaaactgcgacgcccgtatcgccacgatcaataacgatgaaaagttaagagaagaaaccgctcaaaaatggagcgtcatgaacaacacgtcggagatcacaccggaaactattaattgcacgggttgccgtgttgacggatctaaattcgcctattgcagccattattgtgaaatccggaaatgtgttcaaacaaaaggattcaatacctgtggcgattgtaaagaactggatcattgcccgaccatcggtcttattttccaacataaccccagtgcaaaagaaaatcttctatcatcaatttaaaatcacctttttgccttggattcattacaaaaataagtgattcttgccttggatttattacaaaaataagcgatttttgccttggatttattacaaatatatctatatttgtatgacaaaattctaaaagtaagtagcttatgatatacaggtacgccttatcttatctagaaacatggaaaaagaatcccatgcgaaaaccattgatcctacgcggagctcgtcaagttggtaaaacaactctagtagagaatttcgcaactgaattcgattgctttctaaaactcaacttagacgaggaagaagaccgcttactatttactcgatacaaggaaatacatcggttgatagaagctattttctttcacttgcaaaaaaatccgacagagggaagtaccttacttttcatcgatgaaatccaaaactcccccgaagccgtggcgattctacgatattttcatgaaaagcgaccggatatttatgtcatcgctgctggttctctattagaaaatgttattgaccgcaaaatatcctttccagtaggacgagttgaatatatggcgttacatccttgctcattcttggaatatctgaatggaattggagaagattttgatcggcaagtaatagaagaattacaaggcgataccatccatgaaagactaatgtatgaatttcgtaaatattgtatcgtggggggaatgccagaagcaattaaatcatacgcacaaaccaaagacttactatcgttagaccctatttatgacgccttgatcacctcatatagtgatgatttggaaaaatattctcctaacgaaacccaaaccaaaataatgagacatatactagaaaccggatggcaaaaggggggagaaatgattacctttgaacgtttcggaggatcaacctatcgatcacgagaagtaggagaggctttccgcaccatacaaaaagcgatgcttctagaattagtttatccaaccttaaataaccgattaccattagaagcacaattaagccgtcgcccaaaactgatttggctggacacgggattaatgaattataaatcagaagtgcgtgaagaagttttctctgtttcagatatttccgatgcctaccgagggcatgtagccgaacatatcgttgcccaagagttactagcccattccacgaaaattacagaacgacgttactattgggttggaaataatcgaaattcttcagctgaagtagacttcgtttggaaacaccaaccttacgtactgcccatcgaagtaaaatcgggtataaacgcacatctacgttccttgcatatattcatgtctgatgccccgcatgatcttgccatccgcgtgtggagtaaaccgatgagtatagatgaagtgaaagaaccaaatacaggtaaaactttccgattactcaatataccattttactatgttggagtactaaataaagtcattgagaagattactcgaaattgaaaattattatctttaccatcaaaataacaaatgttggttagcggggttggaatcactaaatcggaaatcataaatcaagaaatttagtcaggtgatagaaattaaaaatatagtcaaaagctacggcgaactaaaagtgctgaaaggaattgatctcacgataaaagaaaaagagatcgtaacgatcgtcggggctagcggtgccgggaaaagtacgttattacacattttgggaacactcgataccccggacgagggtgaactattgtatgattccgtgaacattgcccggttatcctccaacaaactatcggaattccgaaataacaacatcgggtttgtattccaattccatcacttattaccggaattcactgcgttggaaaatgtttgcatcccagcatggatcaagggaaccggaaaaaaagaagcggagctgcgggcaatggaactactgacccttctcggtctggcagaccgggtgagccacaaacccaatcaactatccggcggggaacaacaacgagtttccgttgcaagggctctcgtcaatcatccccgggtcgtgctggccgatgaaccttccggaaaccttgacacccgtaccaaaaatgaattacaccagttattcttcactttacgggaagaactcggacaaacattcgtaatcgtcacgcatgacacggaactagcccgtatgtcagacagacaaataaaattaaatgacggaatgctaatgaatgaataaaatgaaccttccggcacgattttctcgtatcgcgaataaaacacgaaaacctgtttgtgttttcgcacaatgttcttaca

SEQ ID NO: 536 - DNA, 2682 bp, Butyricimonas faecihominis
attattgtgtatgtataataagttattaaataaaaaggcaaagttggcattagtcgggttggggtatgtcgggttaccgatagcactagagtttgccaagaagatttccgtgatcggttttgatattaacgaggaacggttggcaaagatgagaaagaaaatcgacccgtgtaatgagttggggccggaagcatttgagaatagtgatatttattttacttcttccgtggatgagttacgggaagcgtcgttttttattgtggcggttccgaccccgatagataagtttaatcaaccggatttgaaacccctgctggcggcatcccgcacggtgggaatggccttaaagaagggagattacgtagtttatgaatctacggtctatccgggttgtacggaagaagattgtgtcccggtgttggaagaggtttccggactgaaagttggaattgattttaagatcggttattctccggaacgtattaatccgggcgacaaggttcatacgttggctaacacggtaaagattgtttcaggatgtgatgcagagactttggaaacggtggctaaggtttacgagttagtagtgaaaccgggagtacatcgggctccgaatattaaggtggccgaggccgggaagattattgaaaatacacaacgggatgtgaatatagctctgatgaacgagttatccattattttcagtcgtattggtatcaacacgtatgacgtgctggaggccgcggggacgaaatggaatttcttgaagttttatcccggtttagtgggaggacattgcatcggggtggatccctattacttggtgcataaggcaaaagagctgaagtatcatccgcaaatgattaatgccggacggtttgtaaatgattcgatgggaggatatatagccaagaagattgtgaagaagatgatcgggatgggaaagaatatcttgggcgctcgagtgttggttatgggggttacgtttaaagaggatgtatcggatattcggaattcgaaagtcgtggatatagtgaacgagttgaaagattttggtgtggatgtagatgttacggacccgaatgcagattccgaagaagtgatgcatgaatacggttttaagttgatcgagaagccccgggcaaattatgatgctgtcatcgtggcagtagcgcataaggagtacatggagctggacgaggagtatttccgtggattgacatacgaacacgctgtattgggagatataaaaggaatttacagggggaaaattcacctgatgaaatactggagcctataaataaaatgataacttcgcgtcagaatttaatgatatgaaaggaattgtattagccggtggatccgggaccaggttatatccaattacgaaaggcgtatcaaagcagttattgccgatatatgataagccaatggtatattatcccatttcagtattaatgctggcgggaatcaaggatattttaattatttcaaccccgcaggatttgccggggttcgagcgtttgctcggtgatggctccgattacggggttcatttcacgtatgcggaacagccaagcccagatgggttagcacaagcatttattatcggggaggagtttattggaaatgattcggtttgcttggtgttgggggataatattttttatggacagcattttacaggaatgttgttagatgccgtgaaagccgcggaaggggaggataaagcaactgtttttggttattgggtaaatgatcctgaacgttacggagtggccgaattcgatcaagacgggaatgtgctgagtattgaagaaaaaccgaagaatccgaaatcgaattatgccgtggtcgggttgtatttttatccgaacgaagtggttcgtgttgctaaagagataaaaccgtccgctcgtggggagttggaaattacttctgtgaatcagacctttttggaggctggtgatttaaaagttcagttgttgggacgtggatttgcttggttggatacaggaactcatgattcattggctgaagcttctaattttgtagaagttatcgaaaaacgtcaagggctgaagattgcttgtttggaggagattgcttatatgaagggatggatagatgcggagcgtttgagggctgtggctcaaccgatgatcaaaaaccagtatggacagtatttattgaaattactgcagtaatttcaataagttgcaggttggcaggttacaggttacaagttatttacaggttataaattgtttatggggacggttaggtgttttgaggattttaagatttggcaggatgcccgtttgttggtaaatcaggtttacttgtacactgcaggagtgaaggattatgggtttaatgattaggttagaagggcggcagtttcggtgatgaataatattgtggaggggtatgaggctggtggtaatgtgatgtttaagaagtttttgcaaatatcgaggggaagttgtggtgaagtcaggagtatgttgtatttagctaaagacttgaaatatatagacgaaataaaggtaaacgggttattgtctgattgtatggttttatctaaaggtatcagtaaattaattacttatttggatgccacaaccagcaacttgtaacctgtaaacttgtaactaaaatatagatgaaataaaggtaaac

SEQ ID NO: 537 - DNA, 2678 bp, Butyricimonas faecihominis
attaatattcaaaagaataaattatttttatatcaaactctcgttaattacctaacatttgaagggattaaaatgatacctcttatgacttaaactactccttgatcctaatatcacaaataattcaatcaaaaaagggaatgaagacaaacaaactgaaaatcaaaatattgcactttagaaaatcacaaatcgagtaggaggaaaacgaagtagctttcttcctactttcgttttccgacctctcacacgtcaacctatacttggctgactgcctgttggacaaagcggtcaacgactgtaggaatgcccagtgggcgagtcttgccgttgtctttggggatttccgcccgaaagacgggcagcggagggtatttaccgtcaattagctgtttcagcaattcgtctttgtggagtttcaggtatggcaacagttcgctcataactatcttatcgacacccccaacaccattgttgcgaacaacctgacgataaacacggttcagattgtccagacgaaggatgtattccaataaattgctgctgtctacatacacttccacaagtttcccgtcaactatccccataaaagtatgcactccaccatagccttcggattccgtcttggactttgggcgacagcccccagattctcccgaagttttctgcactgattcttccatttggtaattattacgttactacttgcttaaataaagttctgcccttcaccaactgccgattttttaccctgctggctactatggcgtctgctgacttctcactgttcgttgttactgccaggctcatcgccaagcccgtaagacctccccagttatggacgtattctttctatcttatacccgcttgatttactttgaaagttccgaatagctatcaagctttgtcttgttttgcagactgacttacttcctcaagccttcatatcaagtttctgtgcgtcaggccagatgtttgccgctgacttccttcagattctgacttacgacggacacccttgtcttgagctgtatgcttcccgctattagggcgcattagggacttacacccgttagaatacgttcgtgctgggcgaacaaaaagagggaacaagtctttgttccttgtcccctcttaaacctgccgaagtaaaactcttcaagcaaaatagtcacacaactttaaactagctaaatcatttttttacttaccatctccatatccttcccagccatacggatccgcattacaactcaagatagacacacatttatgaattacgtttttgtacacagtttgtttttttgtttgcatatcaataaaaataaccgatccttttaattcttcactacttttttcattgtatgtagcaacaaccaatagagattgcatggccgaactattcatacttacaattttaccgcaatcctctggaattgtcacaaaatctgccaaagtcggtaataaaacgggagaagtataaatcttgtttcccacggcaaaataccaatccttacctactaataaagccttagaatcactatccacaccagctaagggcaatacaacgggagatccacatttgctctcaccggtggaatatgcataagatatttttatcaaactaatcccattcgaactagccgtcacgattgtcgcatcatcccaaggagccgcatactctgccatcgtaccgataatcgtatgcccctcaaaactgggacaatctgtaatggctacaactttatcataagcataagaatcccccacgataccctcttccggcacattgggttgagattgaattgtatagtacttctgagaaagtttatcaaaaacaaacatatgtggataaccagcctgactccaaaccggatcactccaataatagtctttgccatgtttcgcaggacgatagagcaaacctttattataactgataaacttcccctggcttataaaaaattgattcccttgcctattcaaaggggcaaattccggagcaaaaacataaccagactcctgatcaacaaaacaactcgtgttgacaatattattgggaataaaagtcgcattttcagttataataaccggattctcacctcctgatgtcacggaagttatcgtccagaaataatcctttaaagcagaaatatgtccgaattttcctgctaacgagcgaggcatatcacccaactcaacaccacttattgaggttgtttggataaatttatcatttccatccataacagaaaaataggaaatcacagatgaatgatcctctcgttctgttaacaagtaatacccccaattaaaaggagaaacgatatttactgcaaaatttttataatatttcatcccgttatctttatcaatcacagtgtaacgacatgttttatttccgaaactcatgtctgaaggggtaagaatacccaaatcacgtgtatccgctattttcttcccatccatctcccaaagatattcgtaattttcattctctccctgaacggtatgctcaaatgtaacgggtattttcagactatcgcccactatcttggtataagtgccatcgattcccgtaattgtcagctcatctacaggcgtataatcataatttcctttatcttcagcacaacgacagaataaaacccctagcataatgcataataaatatatac

SEQ ID NO: 538 - DNA, 2669 bp, Butyricimonas faecihominis
gtgtaaaagtaagtattttgttaaaatatttgtatatttatatcgaggaaacaacaggcctttgcgtggacctgataaaatagcaaatatgataaaattaagtcaaactgtcttgatgttcctgttcgtgggcattctcgtcgcttgccaaccgagggaacgggtgattgattacccggcctttcaggctaaaaattctgcatcacttgagatttcccgtattgttttgaatgactcggctactattatttatgccgatgtcgagcaatttcccggtggctgggcccgggtggattccgggatctatatcttggcgaacgggcaaaagtatcttgccttgaactcggaaggattgaagttgagcgagaaattcgagatgcgtgataccgggttgctctcgttcaagttgtttttcccgccactcccgagaggggtgaattcgatcgatgtgatcgagagccggatgaatctggggggctggcatatctggggattgaatttgaatcctgatgttgaagtggccgcggtggctgtcccgtcggacgtgtctgcccgggactggaaggaagctaccacgttgccaccggctgagttgaagacagggaagacgagggtgaaggtgcgtttatgcggttatcgtgatttgatggacgggcgggatgtcgagcttttcgtgagcgatatgtttagcccggggaaggagttgtcgaagaggatagatcaggatcacagttgtacgtttgaatttgatcagtattccacgatgtgtgttcatttgagtaacacgcttttccacacgatgatcgtgcttgatccgggggatgacgtggaggtgtatgtcgatttggaagaggcaacccgaagggcttctcgctaccagaaagaccggatgaaggcgcatcgtttggcttacgtggtcggggaaagtcgatttatccccttgaattacgcgttacaggatgagtacgaggatggattttccatgtattctttctatgaggatatcaacgggatgaatgccgacgagtatattgcgtacgtgatgaagctttacaggaccgagatggatcgtttggcgaatgacaaggcgctaccggatggggtacggaaataccgggagatcggggtgaaaggttttgtgatgaggctggtttgttccggggagtctaatttggaaacggcttaccgggaggcgaatcatatcgggtgggatcaacgggagatcgatttcaaggccccggagttcacggataagcatttcgcggtgttgaaggatttggatgtgaatcggttggatatgttgtacgctcgtgatttcccgtattgttttgatattgttggctaccggattccgtcgctgaatcggttggaaaagatactggggagtcaagaaggatttttgatcgattatttcaaattgcagggtatttatgatcaactggagaatatgaagcccttgacaaaagagcaactacggaatctagctactatcgatccttactatacgaaggcttttgaacaggtgaaacggcagatcgatgctaaagttgcggaaagtaaggtgaaagcggaaaaacgaatccgggaggtgccgtcggtgtctgataaaaagctattcgatgcgattatggcccgctataaggggaaagtggtgatggtggacttgtgggctacgtggtgcggaccttgccggggggcgattgccgcttttgaaccccggaagaataagttcaaggataaggatgtcgttttcgtgtatatcacgaacgaatcttccccggaatccaaatggttggagatggtggcaggaatcgagggggagcattatcgtttgaatcgtaaacaatgggattatatatgtgattatttcggtgtggacgggattccctcgtatgttattgttgaccgggacgggaatgcccggttgagaaatgatttgaggggatcggggatgttggaacaggaattgtcggggatgctttaagcgccccgttgatatttcatcgtgaactcttgccgaccggtttgttcgtcggtttgttcacgtgtgaccgtgaagccttggcgtttgtagaatgccaaggcttgcgtgttttccgcgtaaacgtttaattccagttcggggtgttgttgtttaacatgtgccatgagggtttgcccgattccttgtccttgccggtcgggagggacgaagagagcggcgatgtagttgttgatcagtgagatgaatcccgtgacctcgttcgtgtgttcgtcttcgtggatgagggtttggctttgtggcaggtacttgttacgcatatccgggatcttgctttcccagtaggaacggggaatgaaggagtgggcaatggcggatgcttccagccatatctggataacggcggcctcgtcttgttgttgaaagtggcggatcatggtcttgtatatttttgcgtttatgtgagcgaatgtaataaaaaataggcgagattgaaagtgttttttaatggagaggaataaatgttggaaaagagggggataaaattgtaatagcttgaagtgctgattttcagaaaaaagttgttacttttgcatggttgcgattcattgaggaggagtggagacattgattttttgtcatgaggtgcggcgctttaccaaaaagtgtatgtttgaatattttttgc

SEQ ID NO: 539 - DNA, 2633 bp, Butyricimonas faecihominis
ggttatggtgaatatgaattgtttcatggaacatggcaatcgttgttaagggatatcaatccttctttgattacaagagataaatgtactgttcctgatgttgaagatgctggttttgaggaggaagaacataaatggtataaagatgaaatctatgacaattgggattattctggttcagatgaatcatgggcatccttaatcgcagatttgccagatcctgtttctatgattcaaaaagtagacgatgaaagtatagaatggcttaccttgaataattcggtaagttgggatgaacctaagagtataggcaaagagaagtatcagtataagcttaaaagacatgatgtcgctctgtatgttgatgcgatacttgttaaacagcaagatattgaacaagcaattcaatcccttaaaggaaggaacttatggggaaggtttgagtttccgtcggatgattggcagtatttggtgaatagagagaagttctggtcgcctgcatataaagatgtgtatagaagcaaaagtgaatgggagaatccaaatgcagaacttaatgttcctttcatcttttccacagagaaagcttgtgggcatattgaagatgataaatcaggcacaatttgtaattatagtattccatgtcggacattgtttgaaggtttagaaatggaatatgatgtgcatgatggtcaatatattgataagtgtggcaatcttgttgcgataacttacgggtatgatcagattttagtgaaaaaagatccactattgaaattccttaaaaagagtggaatgtccatattatgggttgtgagaggggaaaagagggtttatgtgagcggtggcataggatgtttaagtgaatataacccatgtggtatctatcatttagattgtaataaggagccatatggatttcttaaaatgtataagagagtgtgatatgagattgttttgttatagagcaaagtgcggggactcttttcatttacaatatgtaggtaaaagtggaaagcaccgtaatatattcctagatatggggtattctaagacatattctgcaatattgaaaagtgttatctcaaaaattgttgtagcttcagaacaaatagacgctttattcctgtctcatattcatgacgaccatatcggtggtgcaagtaaattcgtaagagatattcagtcggatagtgctcttaataatgttgtaaaacgctggatttataatgctccgagaaagtatgttgttgaacaggcctacgatgaaaataatggtgtgttgtgtgggattgtctcaagtgacaaagtgtatgaacatatcttgtcaaataatcccaagaacctaggtgatatcatagaaggacaatcttttgttattgatggaatgaaagtcaccattatttcaccagatgtggataaattgaatcagttgagagaaaagtattcgaatcatcgccctctatgcaagtcagaaattgataaagcaagtgtagaggcaggaagtgtaatggatgattatttcatcccgctgcagaagtttaacttagattacttccaagaagatacaagtgtagagaacgcaagcagtatagctgccgtttttgaatatgatgacaagagaatcctatggctttctgattcggtaccttctgttgttatgaagtcattgtttatgcttggttttagtgaaacgaacaagatgtattgtgatgctgttttactttctcatcatggtagtgctgcaaataatagtttggcacttttgcgaatgattcaggcggataagtatattattagtgcagatggaatgaatggacactgtttgccgaacaaagaaaccatagcgagaatcgtatctgcttcttcaaatctccccgtgacgttgtattttaactatgaggatggacgattaatcaaaatgtttaaatctgatgcccaagaggatgtaaaatcaaggattgacgttcattatttgaaagatatggaagctattgaattttgatagcgtatcgcccctcatctcaagaagtatataaataaccttccatatttttgttatccagagaacggtcatcctatggtataattagtcgaaaggacaaaaaagagaaaatagcactgtccaaaattagtagattatcgggtagtgtaagcagaattatatcaagtatattttcagacctttaaaatcctatctaccatcgggcacaatgggaaatagaactgttgtcaagttctcgataaagtccttttatatggagagtgcaaatgcattaaaactctaaatatgaggcacaccattgtaaacctgcttttgaatactattcagcgaagatttacacgctcaagtaactttttcggagttgccactttagagaggttaacctattaataacacacttgtggtgagaataatttatagaaccatattgaatcgttttttcttcctcctcgaaaaaacaatgttcgatagttgaaactgattaagtcaatatttgaaatatcaaagttgcgcaaattatcggcactaattagaaatagtgccgataatttgcatattgctgattaattaatggattgacaaatgtaattagaataacaacgagaaatactttttacatattctaaat

SEQ ID NO: 540 - DNA, 2631 bp, Butyricimonas faecihominis
aggctatttattactttgttttttctacatttgaggtgcaaagtcaaataaaattgagaaacaatggaaggatacgaacaaaacgacggaatggatacgaatgatagagatgaaatctattccaatgcagtgaaagcagggaaaagaacttatttttttgatgtgaaggcgacccgtaataatgattattatttgacgatcaccgagagcaagaaaaaatttgataataacggtaatccaagctacgagaaacataaagtgttcttgtataaagaagactttgacaagtttgtcgagggcttagaagaggctattggcgtggtaaaagctgcaatcaatggcgaacttccggaaaagaatactgacctgtaaatagtactgtaataaaatattgaagcgggatgcacgataagtgggtcccgctttttgcatgaactcccttttatgttttttctccactgaaattttgagtatctttgtgtggacagaaagaagagaaacatggagaataagccgttggcagagcgaatgagaccgaagtctttagaagactatatcgggcagcaacatctggtaggaccaggcaaggtgctacggaagatgattgattcgggagttgtgtcttcctttattttatgggggcctccgggggtggggaaaacgacgttggcgatgattatcgcagaacagttgaaacgtccgttttacgtgttgagtgccgtgagttcaggggtaaaggatgtgcgtgaagtgattcagaaagccgagggacagcgattttttaatacgccgaatcccatcctgtttattgatgaaatccatcgtttctcgaaggctcagcaagattctttgctggcagccgtcgagaaaggtaccgtgactcttattggggccacgaccgaaaatccttctttcgaggtgatttccccgcttttatcgcgttgccaggtgtatgtactaaagtctcaagagaaaaaggatctcgaagacttaattgaccgtgccgtggccaaggattattacttgagcaaacgtaatatcacggtgaaggagaaagaggccatgatctcttatagtggcggtgatgcccggaaattgttgaatatcttggagctggtggtaaacggattgggagagggggatattgtcattgataacgaggcggtacatcgggagctgcatgagaacccgttgatgtatgataaggacggggaacagcattatgatatcgtttctgccatgatcaaatccatccgggggggagacccgaatgcggcggtttattggatggctcgtatgttgcaagggggagaggatccgaagtttatagctcgtcgtttgattatttctgcggcggaggatattggattggctaacccgaatgcaattttgatcgcgaatacttgctttgaggtcgtacataaaatcggtatgccggaagctcggattcctttgtcggaatgtgtgatttatttggcgacttctccgaagagtaattccgcttacctggctattgatgcggccattgcaaccgtgaaacagaccggaaattctccggtaccgttacatttgcgcaatgccccgaccaagttgatgaaagatttgaattacgggcaggattacaagtacccgcatgattatccgggaaatttcgtggaacaaccatacttgccggaagaattgaaagacaagaagttctaccaaccccaacagaatgcacaggaagtgaagattctggagcgtttgaaggcttggtggagaaaatatagataatgtggagagatttaaaatctaaaattgttatggtatataatgaattgattaatcaagagatgttttttttgttggccggaccttgcgtgatcgagggggaggagatggctttaaatatcgcagaacacgtgaagaaggtgacggatcgcttgggtatcccgtacgtgttcaagggatcgtttaagaaagccaaccgttcgcgtttggattctttcacgggaatcggggacgagaaggcattgaagatattagctaaggtgagagctgaatttggtattccggtggtgacggatattcacacggaacaggatgcggaaatggctgctgcgtacgtggatgtgttacagatcccggctttcttatgtcgccagaccgatttgctggtggctgctgcaaaaacaggaaagatcgtgaatatcaagaaaggtcagttcctttctcccgagtccatgaaatttgcagtggataaggtaagagaatccggagataaccaagttatggttaccgagcggggaacgacgttcgggtatcaagatctgatcgtggattaccgtggtatcagtatcatgcaacaggcttgccaatgtccggtggttgtggatgtgacacattctttgcaacaaccgaatcaagcttcaggggtaaccgggggacagcctgcattaatagaaacaatagccaaggctggaattgccgtgggtgccgatggtatttttattgaaactcatgcagatcctcgttgtgcgaaatcggatggagcaaatatgttacgtctagacttgattgaaggattgttagaaagactagttcgcattagagaagcgataagatagtttataaagttataaggttcataaa

SEQ ID NO: 541 - DNA, 2621 bp, Butyricimonas faecihominis
gaaaagaatctggaaaaataaaatactactcatttttttagaattacatttgagcaatagcttgactattttcacaccccgcccctctatcatttaagcacacccttacgaatagctaatataatcctccatacaagattccaccaaacagaatcaatctaaaaatcaattttatcgaaaataaatgttcgatgaatacaagatgaatgctcgatggtctaaatgaagtatcaataggattccaatataattataataaaaacgaaacaaattattgacaggattcaattgatgtacaggttctatttaccaatactcgatctcgtgactctcgagaataatctccgataataccacaacccgacaatatcagccagtaaccaaccaatagggattgaccaccagattcccacaaccccgatagccggaatcgcggataaagcataagccaaagcgacacgagttcccaaagaaataacagtcaacacgaccgacatccccggtttccgaatcccccgatagaaaccatacaacaggaacaagcaaccgattccgcaataaaaagccccttcgattcgtaggtactggaccccaatagaaataatttccgtttcatgtaccggaacaaaaatcaacatcaagggacgggcaaacccgaatacaagaagagaaataaacacgcagaaaatagttgcagaaacaaccgccacccggattccatcccgaatacgtttcatttgcccagcaccaaaattctgggctataaacgtcgagaaggcgttcccgaaatcctgcacgggcatgtaagcaaacgaatctattttaactgcggccgcaaacgctgccatcacggcaaccccgaaactattgattaatccctgtaccatcaatataccgaaattcatcacggactgctgggcgcaagtcagagatgaatagaccgcaatttcctttaccgtttgccacttcatgcacatatcctcccgccgaattcggaactccgggaatttccggatcgtgtacacacaaagtcctacccccgaaacggcctgcgcgataacagttgcccatgccgctcctttcactccccaatcacaccacaaaataaaaatcaaatcaagcgcaatattcaaaacaaccgccactcctaaaaaccacaatggcacgatggaattacctatcgcacgcagtaacgaggcataataattatagataaaggtaaacccgataccccaaaagattacccaaagataatcacgcatcaacgggtaaacagcttccgggacttgcaataatctcagaatgggatcgatccatacgaaaacagcgacattcaaaaccaaagtaaccaagcctattaacaccaaagaaacaaaaatactacgtttcaatgcctcccggtctcccgccccatattgcagagaaaaaatggccccactccccatgcacaaccccaaaagtaccgaagtcagaaatatcatcaacgagtaagccgatccgactgctgccaacgcattcgcccccaaaaactgccccacgatcagcgtgtcggcaatattatagaattgttgcaacagattccctaaaatcatgggtacagcgaaccacaacaacccaagagttatatttccggtcgttagaccccgatccttttttataccgttaaacgccacgtccctctctgaaaaacgtaaatactatttttgttgcaacaaccactctatcaactctctattgtcaacaatactccaagaatgtggatgccggttattatccggcttccgataccctttattctgagttgtaataagaacagccctgtcgttacccaacctttttaattcattaatcatcgcagaacaatcaatgatattcaaaccaaagacatctgtttcccgttcatcaagccaccattgaatatcaggttctatatatatcctaatcggtgtacccaacaatccttttatagcagactgcgtcgtgtcggaaagcgaataaggagatattttgtgataattcttcaaggccgtttgaggtgttcctcccatgatttgctcgatccttgaaagcagataaagatatatgttctcttcgccagaaccaccctttccaaacaacatgacatcccgtttcgtggaattataaaaccgttcaaaatccagcggtgagtctatggcaaaaacagctttgggctttttatctgccgtttccgcaaattttacaaccgtacttcctcccatcgaaaagcctccaagataatattccagatcctgcaatttatgtctactcgtcacatcatcaacgattcgacgaaatgcctgctggctcaaactatcaaacccaaacgaagaaacgccatcctgaaaagtaggtataatagtcaaaattcccctttccgctgtttcgacaggtagttttgtttgcagcaaaacatcctcggccgtttcaccaaatcccggtaccaaaaacaagtaccccatccatggtaacgagtcaggataaatgatcgtgtagcaattccttgtcgtatcattcttatcaagaagtactttttctatcttttgagcagaaagttccgtcatcattagaaaagatagaataatcaacgaatatctatacat

SEQ ID NO: 542 - DNA, 2620 bp, Butyricimonas faecihominis
gtcttatattactatttaatttcatattcacgctattttacttttccggataattgtgcaaaaatctgatccaaactacacctttcaaccacaagctctttcaaattccaatcattcattacgctcgcttcaacatatttctccgtaaccgtattatcctcgttaaaaaatattctaaaacggttttccgacaacgcctccactcccttgtttggagccaaccggacaagcacctcctttcccggagaattattcaactcaataataaaactatcaggagcgatataattatcaaaatcttccatagacccagaaaacactaaatgaccattatcaatcatttttatatcattacatatcgcttgcacttcagacaatatatgggtagacaataacacggagtgttcttccgcaatctctcgaatcaggttacgaatatccacaatttgattcggatccagtccatttgttggctcatccagcaccacaaaacttggattatgaacaatggcctgtgcaatccccacccgctgttgatatcctccagaaagattcttgatcaaacgattacgaaaatgcgcaatcgaacaacgttccaaagcgatatcaacagccttattcacttctgacttatccatcaaacgcaaaaaagctgcattctgcaaatactcctccactgtcaaatccgtatacagaggaggctgctgaggcaaaaaaccaatatactttttagcctctacaggattttctcgtaaattaatgccattaataaaaacttccccttctgtctgattcaaaactccacaaataatattcattgtagttgacttgccggctccattagatcccagtaagcccatcacccccttcttagtgatatcaaaactaatatcttttatcgcccattgcacactatagcgatgagacagattttttactgatacaatcgaacttcccatatttactctttattagggatttcttgcaggcacatacgacctgcaagaaaagtatcccatcctaatttatccctgattaataattccaatgatctaattgcttatattggatatccactatccgacccactctctggtctgccggataggctcctttcgggtaaagcacttttttctcctctgccacatttttggcttcacgaataaacaatatgtagaattccccattctcaagccccacagccatatgtttgttgtacattgattcagcattaattgctgtcacctttgccccaaaactcttatacaagactaccgaattcttcgggtttttaagatctaggaagtagacattattgcccgccccaaagaacgcatactccggcttatccaacggcaccgtcactgttgacggcacctctggcaacccttttatctcgtgtaataacacctcttgtagcaccggacgagcagaagatcccttcaaacgaatcaattccaaaaataccttatcagtactttcctctctcaacaatagataaattccatattgatttgtccaatcttcaagcgccccatatccaaacatccccatcttaatcaactcgtaaccttccatattatctagtggaacaatcacatcctcctctgtgttctcaatcccccgggctggcaatgctacaaatctgccggctccagcaatatcatcccaataatcgctattcaccgtgtaaagcatccgcttgttctttccatcatacactacggcatatcccgtacgatttgcccgataaaatccacgggccacccgacattgctccaacgtctctccttcaaaagaaagcggggtctgcaagaaatactcggaattgtatacagtcgctactgcccgaaaacgggagtacaactgtcccttctgatcggccagtacatccacccggtccatgaacgtaccgggataaataattgctcccgctgggtagacgcccccatcaaacgattccaccatgtcaatctgtttctcgaatgattctccacttaaatccacagcaccactctcttggaacacgcaaacattaccgattatcgtctcataatctacctgcgcccgaaaatgctcctgtagtgcaataggacctgttcccaattttccatcatttgccatgacgtaaacatcgtcatagaacttcacttttttaaactcttcagcatcactatcatactccaaattcgaaaagtaagacaagcgtgattcgccttccacatccgacaaaatcatccacgaataattattctcaaaaatccccaccacgtcaagtgatgcacgattcatgtacgtgatgccatatttggtatccgtcacctccaataccaccttaccgtctttaaaaatagtgtccaccgcccaattaaaatcacgttgattccactccggtcgcatattcccgttcacgtaccagttatacgtgtagcggtctgactcctccggaagttcaagattgaaatcgggcgtaatactcaatgattccccaaaagtcaccgaataagttggtttctcgaaagtaatttccaattcattgatgtttttgtaatcataatttcccttatcttcatagcaaccggacatcacagctaccacaaacaataaaaaagttatatat

SEQ ID NO: 543 - DNA, 2616 bp, Butyricimonas faecihominis
aattatgggagattttgacggagaaaggaaagatttaccgaatgccacggcagcgcttgttttaggagcgctgtcgttggtgttttgctggtgctacgggatcatcgggttggtactcggtattctggcggtggtactggcctcggcgccccgcaaggcttatctggaaaacccggagcgattcacggaagtatcctataagaacttgaacgccgggagaatatgtggcatcatcgggatttgtatcggtgcgatcatcctgttggccgttatccttgtggttgtttttgctgtatatacttcggtaaaacctcatttgctcaacacgataaatgtatgaattgagcatctggacgtggctggagaggcatcaactgccttgcttggttaaagacaccttcgggatcgagtgtcccggatgtggattccagactgcggtgttattgctcttgaaaggagagttgtgggagtccgtgaaaatctatccggggttgatccccttgatcgtgtttatcggccttgccatggtgcattttgtgggggtgaaaaaaattactcccgggggaataaaatttgcaggttttgtttgtttgctaataattttaatttcatatttgcttaaattaataattcattaaaattacgatcatggagataatggaaatgaagaaaaaggatcttcctaacgcgacggcggtgttggttttagggattttgtctctggtattttgctggtgttacgggttcgtgggattagtgctgggaatcttggcggtagccattgcttccgggccccggagggcttatctggaacatccggaagagtacacggaggcttcctacaagaatcttagtgccggacgggtttgtggtattgttggaatctgcgtggcgttggctgttgtcgctttcgtgattttaatgatattaggtgtaacggcgctgggcgtcgggtcagcattgatgctaggttaaaataaaataacatatggactacagatttgaaatcagtttaccgactagttcggattttagatgtgagattgctgttggtggagaacagacgtttcaacaatttcacgataaaatagttgagacgttgaattatgacagctctcaaatggcatcttttttcacgcttgaccggatgggaaaccgggtgaaagaaattgcattgatggatatgacgacagaggacgaggaaaatgaaacgctcgtcatggacaacacgaaaatcagtgacatcattaaaccgggatgtcttgaattagagtacgtgtatgatttcttctctaacaagtattttaaggtagagtatgccggggagtacattcgtgattcgtccgacgtgatgccggtgtgtgtggcttgcgagggtgatattccggaacagttctcttacgaggatgggaacgctgactgggagtttgacaagccggaggaagagtacgagggggattatgacgatagtttcatggaagagttcggcaacggggattatgatgacgaggatcgccaagaccgaggtggtgatgacgagtactatcgtgacgaacgctacgagagtttggatgattatatagatagactttgataattttagattttagattttaaattttagattctggccgcacaaggttcctttttttcaatttaaaatctaaaatcattaaatctaaaatgagtatggggacgttaatcgtgttgcttggaccgacaggagtggggaaaacggatttgagtatcgagctggccaagatgtacgggacgtcgattatttcatgtgattctcgacagatctacaaggaaatgtatataggaactgccgtgccggagcgagagcaactggaggcagttcctcatttttttatacaaacagagtctgtccggaattattttaattgttgggagttcgagcaacaagcacttcggaaaatccgggagttgttcgagacgaaagaggtggtgatcatggcgggtggttccatgatgtacattgacgccgtgtgtaaaggtattgacgagatgcccacgattgacgaggaagtgcgtctttccgtgaaagagatgtttgaacgggatggaatcgaggcgttgcggatgttgttgaaaaggttggaccccgtgtcatataccacggtggatttgaagaatgccaaacggatcatgcacgctttggaagtttgcctgatgactggaaagccttattcttcttttttgaccgggagcgtgaaggagcgggagtttgacatcgtgaagatcgggttgaaccgggaaagggaagaattgttcgaccggattaatcgccgggtagatcagatggtggaggccggaatggaggaggaggctcgtgaactttatcctttgcgctatttgaatgccttgaacacggtagggtacaaggagtggtttgatttttttgacggcaagtttgacagggaagaggctatccggctaatcaaacgaaatacccgccgatatgcaaaaaagcaacttacttggtatcgcaatgactctgatattcattggttccatccggatcaaaaagatgaaatcaaacgatttcttttaagttttgttgattttaaattttaaattccaaccgcacaaggg

SEQ ID NO: 544 - DNA, 2613 bp, Butyricimonas faecihominis
ttataaacactatccgattgattcttaactccatctattcttgggtgtggcttttcatcaaaggaaaagttatcaaaataaggagaaacaatataaatactatgaaagaaatttattgcattattattaaacgatgtcagttccttgccaagttcataattgttactattcaagtaatagtaatagaatttatcaccaatttttttactccaacggatatatgaaatttcaaattcaaagcctgaaataacctccgttacagtttcgtcttcagttatcaaatattcatagtcaatagctgtcccattaatagttattgagtaccctttttctttatttaaatgcaaaaaccagccaaattcttgggcaagaaattcgctaaaagagggttgtataaaatgccatgatgataatttctttaaattgtaaaagaacacatctgttcccgtattaccactttttattatctgattgttgtctgtttcgtaatggtctttatctccctcattaattgttatatcatattgcaatattgccccatcttctttttcatatcgtgttctccaaaccgctttcgaacagaagtttataaatgagaatctacctttccccattttccctctgacctctgatgtccgttgaaatgtttgttgcttttgtgaatcaagaaaagcgccaaatgtagaagcaatggttgataagtttatcccttctccattatcagaaacaataaaatgagatatataaccaatttcattagcttcaaattgaatattcacatttgtagcctttgcatcaaaactattccaaatatattcagcaatagctaacttataatcagacggtattcctgcattgtcaatactcttattgcgtagtgttactttacttctcatatttgtatagttctatatttttcaaatttaaccagtatttcgtgcaggttcttcaatgcttccacagccttgcctatcggcggcatattgcttttgtcaaaggtcagtttcttcaaatcggtaatgtacgccgtagccacttcgggtaacgccatgaccgcttcggcatccttgaatatcggtgcatcagccagcgacaagtgcgaacgggagtttttgtttagcccgtcctctatcgtcacccggtacatggcatccaagaaatcttccgaatgtaggtaatcgttatattcctgattgtggtagagtgccgacaagtcgtaaacgtcacggatatgctttgccaacagtgcggctgcatcctcattgtaagacagctttaccagccttgaaatcttgtcgcagatagtctttcggggattgatacactgcgtttcaaaacttcccagcccgtaggtgcttatcagttcctcttgcccgatgctttcaagaaaggcggtcacaatcggtttgataacccgcttgtctgccgggtagaacatcagttttttgtccggcaggtcacaagattttatctctaattccaaatgctctttaagtcccacgccttgaaatacattgtcatacgagaaatacagtttgcggtaattaccgcccgtttccgacaaatcttccttgtatatgtcactgttgagttcggctatgtatttggaaagtttcttgttcaatgtcttttccgcctgcttggacgcacctttgtcacccgtaaacacgaacaagtccaaatcttccgagaaacgttctatcagcccgtaggctttggaaagtgaagttccgcctttgaagtaggtcttatccgcatattcggacatggaaatatcccgcagtatcttcgatacccagtaatccttttccacgtgcgactgctcgtagccgaaatgttcagccgccagtgcgatgatttccttgaacgcttctttgtccgaatgtaaattcatatttctgtcctatgctgttttgtaatccaagttgaaccgtgtcgtgggaagaatggtctttgccatttctgtttgcaatacggtttgtctgatgtcgcccagtatatccgccaccacctttctgacacgtggcgggtaacttttcgccaaagatacgattttttccagttccggaaggctatacccgttgaaatattggcttttgacccggttgtagatgtcctgcccggtggttccgggtatgcgcttcatgtcctttatcgcatcgagcagccgcaagtacgggacaaggctttcatccgggtagtccatgctgtatgctttcacacactctatatccaagttcttgaaacggaaacggcgtaccgggtttggagtggctatcgttatggttgtggcgacctgttcggtaagccccattttgttatagacgtaagcacccgtgatatagccgttcagtttttcagtcaggtagcggaactgttcatcctgatagacaggcagctttcccagtcccagcactgatttcttaggacgatagtacgcccccttttcaacccgaaccagtatccctttgcgactctgttcggagagtagcaccgcaacattggcggtcttttccgtttcaaacgacaaatcccggaacgtgaatatacgcccggtatctatccgttcaatctgcccaagtatctctttcctgaatgaagccatatttatgt

SEQ ID NO: 545 - DNA, 2584 bp, Butyricimonas faecihominis
ggtattatccgtcaattttctataatagtttaaattaaatgttattcggtctttaaaaagactcaaattcatccccacattatgttgaaatgtattctgttgtttcagattcgggtttgcgaaagttgccatctttactcccacacctccattataagtgtaattggtttctcgattaaaaacctccattgactgttccggggagaatgccatattaccggaaaccccatacgaatagcggaattgccaatttgaaataaaaggtaagtgttcaattataaactcttccttactaagcgtccatccaacacctaaagcataaaaagaagaaaaacgactatttttcccaaaagaagaacctccgtctaaacgataagtcaaatctataaaataacgcgtatcataataataattacaaaaaccacttaatgatactctacgagaggttgattctgaaccataagttcctcccgtagaaggataacctaaagaagttgccaaatggtcaatatccgatgttaaaaatcctgttgcagaccaagaaacattatcatattttgtttcagacatttctccagcaatacctactgttagcatatgtttttcgttaaatgtttttgcataattcaacgcccatctcgtttcccacaatgattccgttttctctcctctaccataacttcctttttgctctatattctcctcactatcataatatttatgcgttggtgggataaaagaatcttgtgttcccatttttttagttaaacccaacattgctgttatttgaaaagcctctgaaatatcaaaacgagcctgcgttgtgctacgtaatgacgtgtattttgattcattccaacacccaacctccttattatacatcggattatctataagagccgttgcattaggatgataatattgttctatcaattctccattttcatcataaggttcccaatatctgttcatcctcacgtaatcagaaaattgtccataaggactatcttcacttgtattcaatcctatcgttaaaagttgacgtacattccatttaccatgcacgtaatcaatttccatcgaaccgttgaaatttgtacgatcagatcccttcataacgccaattgtttcatcataaaacagatcaaaccgaaaacgccaagcctcaactcctcccatgatattcaatatatgctgttgtccaactcctgtacgaagaggctctttagcccagttataattcacacctgaatcaaccacatcttttaaagactggtataactcctgaagacttgaatcatcccacacgccatacactcgttctaactctaatttttctctagcattcgttaagttgtcatacgaacttaaatctggaatttcgactttaacttttcccgaatatgtcaccgaaatttttcctgctttaggacgtaacgaagtaatcactatgaccccattcgcccctctagaaccataaagagctgtagcactcgcatctttcaaaatagtgatgctttcaatttcattatcattcaagtccattactcgttctaacgttacctcgaaaccatccatgataaacaaaggttgattcaattcataattactcttttgatctcgtatatcgtctgcactaagtaatgtggatgcccctcgcaattgtagttccggtaaagcattcggattagatccttgtgcgttattctgtataattcgtaaactaggatctaaactcgctaatgtctgaatcaaattccgagaataatgagttctgatctcttcttgagatatagttgtcacagcccctgtaaaactctctttcggtttattgaaaatacctgtcacaaccacctcttccacctgttggaaatcctcctccatcacgatctgcagtgtatctgttttttctgtgaaagtaattttctgttttttatatcccacgaaagaaaactccacctcccctttcgtcacaggtaaatctatcgcaaaccatccttgagcattggttgccgttcccaagctcacccccaccattcttaccgtcacccctggtagcggttcctttttcttatcacggacccacccttttaatcgcagggatttcttttcttccttcgtttcctgaggttgaatcacgatcacataatcttcaatctggtaaacgaaccccgtgtttcgaaggacttcatccagaatctcttggatagtagcctcgtgcacgtttattgacttcacccgaatatttctcacgtcatccatattatagataaacgtgaactcactacttttccgaatagttgaaaaaacatctgttaatgcgacattttccaacgtcagagtaaaccttgcattctgtgaataacttgctgctgataccgaaacagacaacaagaaaaaaaagcacaaaaatttcataaccaacaatgtttttcgcagccttattttcataagaccaccagaattacatttttttttcataactttgttcttgagttttacattgaattaaatattgaatgtattcggacagatagcatgggggtgctgtctgtctttttttattcatacacgtttatagttc

SEQ ID NO: 546 - DNA, 2581 bp, Butyricimonas faecihominis
ctataagtccttgaatcgttaaaaatattccaaaatgcaaatattttttcaaagacttaaaactaaatgtaaacaatggtctccaagaagattttacccataaaataatactcttcgcaaatggaggaataaccatattagcaacaatggcccacacgccaaatcccaaaaatacgatcactacagagacaatacctcctataacatacgaaagagccgtagcccctgcaacccatgcaaatcttaattctctattaagcatcgcattctgtatgatagaaaccgaattgaagacaatcactaaaaaaacgacttttgataacaattccaattctggagcatcaaagaacgttgcaatatagggagatagacaaaacaatatcgcataaagtattattgacattatgaagttaaagaaaaaaactgtcgacagatcttgttgcgaagggttatcatcccgaataattgcctgcgtaaatccactatcaattaaaacattggatactgcaacaaaaacaattaataatgctattagtgcaaaatcataaggttctaacactcttgataaaactatcgtaacaataatacttatcaatccattcaccaacgttcctgcagaagtccaaattaatccaaaaattgttttttgttttaaccccatatatcaatgcgttatagttctttgattttctctactagcattttggtaaacctttgtgcaccattgtcattcagatgggcgttgtctttaaaaaaatgggatattttttacagcaattcttatttttgaaatattttcagcaaattgcttgtaagtataaaaaatattgtcaatacaaaaagcatttctatctgaaaatttttgtattgaatcaagaattgaagtaataatcgttttcgtaaacatctaaaatttatatgtaataagtttcttttcttctaaacattttgatcgactaaaattatctttactctaaacttgttacaatctcgcatctacaatatcccgatttaaaaatcccttcacatcaaaaataacatgtttcccatgcaacaacgaactagtatctatccttctgaattcctcatgggctaccgctaaaatcactgtatcgaatttctctactggagactcgttcgttatctcaacgccatactcatacaaagctataacaggattagcccatggatcataaacagtaatatcaagattatactctttcaaggctttatatatatcgaccactttcgtatttcgaacatctggacaattttccttaaaagtaaaacctaataccaaaatttttgaattcaacacttgaatcccttttttcaacatcaacttaacaacctcgtttgccacatactctcccattccatcattcattcgccggccagccaaaataatttctggattatatccatgtcgttgagcacattgagccagataataaggatccactcctatacaatgcccccctacaagtcccggcttaaaaggtagaaagttccacttggtactggcagcttcaaggacatcttgcgtgtctattcctagcttattaaaaatttttgacaactcgttcacgaaagcgatatttatatctcgctgagagttctcgattacttttgcagcctctgccacttttattgtaggagccagatgtgtccctgcaacgatcaccgaagcgtaaatttcgtcgatttttcgacctacctccagagttgatcccgaggttacttttttgattttctccacggtatgcaacttatcacctggatttatacgttctggagaatagccagcaaaaaaatccttgttgaattttaatccagacactttttccaccacaggaatacactcgtcttccgttaccccaggataaacggtcgattcataaaccacgatatttccccgagaaatcaccttacccacggtcgtactagctccatataacggggtcaaatcaggattattattatcatctacaggtgtcggtaccgccaccacataaaaattacaatcccgtattttttcaatattcgaggtacaaataaaaccatcagaaatagccgtttgtaataactcatcgctcacctctaaggtttcgtcatgccctgccattaaagcatccacccgtttctggttcatatcaaaacctatcgtttcatatttagttgaaaacaaccgagcgagaggtaaccccacataccccaaacctatcacgcaaattttcacatcttgcatcataattcgtttatattgtttttacttatagattattccaataccatttcaccgtttcctgcaaacctagcctcatactatattgcggtgcgtatcccaacaagctttttgctttatcaatgctcgccaaggaatagggaatgtctcctacccgattcggtccgtgcaatatttcgatctttcttatctcttcgtcaaattctcccaggaattcttttaaataccccactagttgattcaaggtagttcgttccccaaatgccgtattataaatttgatttaccgcatcaaaattcgttgcgtccaaggcaagttgattcatttgtataacat

SEQ ID NO: 547 - DNA, 2580 bp, Butyricimonas faecihominis
gttttcatctttgtcaattatcttttatttataaatgttttgccggacaattgggcaaaagcggtatcaagagagtcccgttcaagtgtaatttcactgagacgccaattattagcgacactcaggtttattatttgtttagtgatttcttggtcagatgagaagtgcattctgaatcgagtgttggtaatgtgctcaacctgagttattccggggattttttttagttcttccaatggtggtgctgcttcaagtgatacaaggaatgtacaagggtcaatatagttattcaagtcattaatagttccggcaaaaacgacattcccatgctctatcatttgtatatcgttgcaggttgcttgaacctcagagagaatatgggtagataacatgatggcacgttcttttgcaatatcctttataagatgacggatctcgattatttgattgggatctaatccattggtcggttcgtcaagaacaacgaattgaggtttatgcacgatggcttgtgcaataccaactcgttgttgataaccacctgaaaggcttcgaatcaatcttttactaaaatgggctatttggcagcgttctttggcttcttctacaacctttttaacctgatgtttgtttactaggcgcatgagtgcgcagtgagtgagatattcgtcaacagttagatctggatatagtggaggtttttgaggcaaaaagccgatttgttttttagcttcaacaggattttctctagtattgattccattgatatatacttctcctgctgtttgacttagtactccacaaataatattcattgtggtggatttgccagctccattggaacctaataaaccgagaactcccttttttttaatttcaaagttgatgtcttttattgcccattgtatgctataacgatgggaaagatgttcaactctcacgattgtttcttccataaattcgaattgtgttactgatttacatgtctgttttcagaacacacgaagaattgaaaaggatgaatgggacgtttgttttttatattttttctcctagcaaaaggatgattaagatgtaaaaatgatcttttaacacttcttttaaagtgcttagggcattatattttagagttttgacggagtttacagagattcctagtatttctgcaatttctttattttgttttccttctaagcacattttgataattttagaactctgtggaggaagagaatcaatcgcatgagaaacgatacgataggtttcttcttcgattaaacgatttttaaaatggtattcgcggttaataacttcttgatttgtataatcaatggtttcttttttatctcgaagataattgaaacagagattttttattgaaacatacaaaaaggttttcaggttgggaatctcttcgtatgaggtcctcttttcccaaagttttataaagacttcttgtacaatgtcttgtgcaacatctttatctgacacgaaacgtatggcaatagcacacattgagggataaaattccttaaacaaggtttcaaacgcttttatatccccgtttcttattgattcgaaagaaatggtgtctgccatagtatttagtttctcccttagaatgtaacaaaggtaataaaaatgaattagagaatttatatcgtgcaaaaaaatgtcactagaaatggtacacttaaatccacggttatcccgtgaacgattgatatgattacaaactcttttccgcagaatcttgtgataatcggaagtgtggtatcagcggtggttgctcctcccacggaaataggggctagtttaccaaaatagcgcacgagtagaggggcggctaataaggctattaattcacggaggatattagatactaaggcaattgtgccgagttcggcacctttgtattgagtgataaaaatagtcgaaagggaataatatccgaatccggagcctactgcgagacaatcggtgaggcttttgccgcttagaacgaggctgattaaagccgagcctaccagagtgccgataatcgttgccaatggcaccagaatgattttaaagttctggtgtttcaatgcttctagagcttttttgtcacttccaatgctgatgcctacgagaaacataagtacatatagggcgtagagagtgggttcttctgcagctagcagggcgggaacatcaacgagtcgtccgagtaatactccggcaacaaaaaaagagactatgattatactacctttcatgtgatggaatttatttggtggtcatgaagaaaaagtgatagacaccccatgcgcacaatacacttcctgtaattgccgctaaggtaataagtaaagcttccaatccgatagaatcaagattgttcattacctccccgttagcaccaactgtgatccctaaaagaaataaaaggagaaatatggcataattaatgagtttttgcacgaacttcaaatttctctctttaaaggcatatcctaaaatgatgccgcaaaccatcaaactaataactataatcatgatcttagatttctttccgcgaaactacgatttattttataa

SEQ ID NO: 548 - DNA, 2564 bp, Butyricimonas faecihominis
tccatacgggttaagataagaacgggagccgcaatctctcgttcttttgatctcgtatatgtttatctatttttcaaacttgccgttaccacatttcctttcacgttaaattgtacatctgaagtcatctgaagaaatttaaacatttcttctaaaggttggtacttgttaaccactcccgaaaaacgtcgagttttaatctcctcgttcatgtaaaacattttaaaatcataccaccgctctaatttctcgaccaattcttcaaacgtgtatgctttaaaatagaatttcccatctcgccaagacgtgtacaattccggcaaaacttctctcagtccagcttttccggttcttacatcaatctggtattgctcgttcggtttcagtaaaacttctttttcctcttgattaatcatcacggaaccttcaaccaaagtagtctgccaaaaacgatcattcgaatacgcacacacgttgaaagctgtccctaatacccgaacttttcccacctccgtgtgtacatagaaaggtctgttcgcatcttttttcacctcgaaataagcctctccttccaaaaatacctctcgtcgattggaagtaaatttctccggaaaacgtaaagaagattcagaattaacccaaaccaccgttccatctggtaattctaaagaatactccccacctttcggaacaatcaaggtattaaaaaccaaagaatcttccattcctgtcttatttacatgataggaaactttccccgtcactgtgtcattcacgatctccactcccgcatttcccgaggaataaactccttgatgctcgtttaatgctaaccgtactcccgttcccaaacgcaattctgcctgtaacctaccgggttttatcacttcagcacgtacaattttttcttccggctccggacgagtaacgacataaaccaaagaaacacccaatacaaccatggccacatatttacaaaccgacaacatccattttctaccccttttcggttgtattttccgccacgcgttatccacgtcataacgatgggggtccaagccgtgcatggcctgccggatttcgaattgttgttgcaatatctttttttcctcctgagatagctctccttcctccggccttcgccacaaagaagtcaagcgctcccaattattttccagaaaatcgttcatttcgtatctattttcctatacgacaatcatccttcaaaagaaggtgagttaaaaatgaacttttttcaagaaaaatatcacacatttaaaaacgatctgattatcaagacctatatattcaattcatgtcatctatctttggccttgtaaagcaataaaaagcaatacggaagtgtgttctccacctaccctagctcgaatattccgatacgctttcatcacgtgagacttcacggtattcaccgatatccccaattcatccgcaatctccttgtattttttcccgtctaaacaactcatcgtgaacaccgtccggcattgcgcaggtaaagtttgcagaatctcttttatttgctccacacgttgcatctcctcttccgagtaatcagaattttgtagatcttcaataaacgccatcaatgacgctccatgttttcgctctatcattttatgtttcaatacatttaaagcccggaaacgtaccgaagtaaaaagataagatttcacggactcctgcacccgaatctcctgccgacttttccagagatacgtgaaaagatcctgcacgacgtcctctgcctccgcctgatcaccaagaatcatgactgcataatcgcacaatggcatatagaacatccgaaacacttgttcaaatgccccttggtctccattctttattttagagaaaacttcttccatgatacaattctcaccactcatggagacaaacttacacaaaaatccggattctcgaacgatcagatggaaaaaataatatcacgaaaaatgatcgggcagagccattcgctcccacccgatcatacaattcacgtatcgttattatctcacgataatcgtaaaacagttattcacatcttttgacctgccctcattccaaaagtttaaagaaatactataccttccccgaggaacatcattctccaccggaacagaaaggacaccattcccccggacagaaatacaagcggctaatttatcagcatccccgccctccgaagtaattgatttcacctgacaccagatcgggttacttccctctattccttcaattggggtacttgtccaaggcataccataagtcacccgcagccaatcttctccacccccaactaacattgtcgggtaaatttgaaaaaacatcgcaatttcttccgggctaaatcccatatccaaatacatttgatattcaggattcgatacctcttctgggggtgttgcatccagttcataatttattactaatgaatctaaactatacccggcatactccgtaatcaaatatccgatttcaatatcctgacatcctatattaaccatcgagaatgggatagtcagcataaaaagtattattag

SEQ ID NO: 549 - DNA, 2560 bp, Butyricimonas faecihominis
gagttataggatatgttaacattcggatagatgtataatagtaacttgatcacgtgaatatagctctatccgatagaaactttacccgacgattgattttgcgaggataaaacctcgcctctccctgcggtttgcatgggcgagaacggatggtcacctttgttagttttccatcaatttcgagcctttataagcgatggcgtacaggatgaacgtgagtagaatcaatccggcgataaaccattgccaaccgaagtggtcgagaacgaccccggtggctgatccccaaacactggaccccatgtaatagaacaggaggtagatggagatggtgaccgaacgtttttggaggttgtagtcactgacgattcggttacagatcacgtgtaccacgaagaaattaaacgtgaaaatggccagtccgagcgtgacgatccagaagttgttaatgtaaagcaaaagcaatcctgccacggaaagggcgatgattgttttcagtattttgaagtggttgtacaatgctgtcaattttgccgtggcgatcgagccgaataccccgaacaggtacatgaaatagatatagtgaatcaagtacggggagaagttaaacggttcttttatcagataaaaaccgaggtagttgtacaggctcacgaatatccctaacatgagggagccgatcagatagaaggggatcagtttcacggagacgatcaagtgaaggttggaaacgatcaatgatttgaaattttcccgtttgggcttgaaattgacagaacggggactgaatatcaggaatgatatggcaaataaggcacatagtacacctatggagacggaggcgatgcgccacgagaattcactactgaggtaagaagaaattactcgtccacccattccccccaaggcgtttccggcaatgtagagtccggtaatttttcctttattccggggttgaacttcttcagatatgtaagccagtgacacggaagtggctcccgatagcaagaatcctttcagggcgcttaatgcaaccaacaagaagaaggagggcgaataagagcagatcaccgaaaagacggccgacgataatagcgccgcgctaatcagtttcttccttgaaatcgagtctgccacgaacattgccgtgaacagtcctactaccattcccagcgtggagaatgatatggccagactactgtagctggctgataatccaaactcttgagccagatcgggcaagagaggctggaaatagtataactgggcaaaacaagagaacccggacaagaagacacaaatggagatcttgcggtccttggtcatattctccggtgtgataattacttgacttgtattcatgacttttctttatccggtgcaaaagtacgtattctatgagcaggttattctttcgcggagaagtttttcatcggaaactttcttttctttttctcgttagaatgagtatcagaaaataagattgttaaacagataaatttgagaaagattatgagaggaaggattttaatggtgacgctatggatggcatcattgtttgtttttgccgcttgtcatgatgacgacgacgatgatgataaggggtacacccccggaaagagtgtcgtggccgcttttgaggcgaagttcccgaatgccgtggccgtgagctgggagaaaaaaggagagtatgaaaaggcggagtttcatcaaaacgggcaggaagtggatgcttggtttgatgcatccggaaaatggatgatgacggagacggacgttctgtttgccaatctccccacggaggtgaagacgggtttcaacgagagcatatatagcgcttggcaagtggaagatgccgacgtgctggaacggttgaatatgcccacggtttaccgcttggagatcgagaagggaaacgaggaaatgttgatttatttcaatgaaaaaggggagctggtgaaggaggtaaatgaagaggcttccacgttaccgacggccgtgagtagtttcattacccagcagtacccgaaggccttggttgttacgcttgatcgttggcaggatggtatgttggaagtcggtattctggatggcagtttggtaaaagaagttttgtttgaccggaataacggttggatgaagacttcttggccggtgttgaaggccgatgtacctcaggtggtgcttgatgtgttgaagggcgaggcgtataacagtttttccattgccagcgtgcaatacatagaatacgcttccggtagtgacgtttaccattttgttttgcagaaagagcattcgatggatataagtgtagaaattgatcctcaagggaatttggttttagattgatactatattttatgggaagagggctgtcccaaaagtcattttatttcaaaaaactcctccgtcacttcgtgccacctcctctataaacagaggaggagctggtgactcttcccgaagacagggagtattccagctcttcctctgtttatagagggagtaccccgcagggggggagggagtttgaaaaatgcctttgggggacagcccatgt

SEQ ID NO: 550 - DNA, 2551 bp, Butyricimonas faecihominis
attaaaacatgaattatgaaatttaagatatttctgggagtatttctgttgggtttgttcgcaagctcttgttttgaagatgagtcggcgaaagatgtaacattatttaatccgttaatgattaatgattttttgtcgtcgactgaaatatatgtgacacagggagatcgtttgagagtaaaagtactggcttataaagaggggacggatgatgcgaaactggaatatgaatggcgtttggaaggtcacgggcaacatttggatttgggacattctatgattctggatacggtgatcaacgtgcctatgagtcgagatgcctattcgcttttatttaaagttaccgatacggaatatggattaactttgagtaaaaaatataacttgtatgtgacgggacaatacgtggccggtttattggtggctgatacgaaagacgggatgacttccgatattcatttggtgtcgagtaaaaattttacacaagactataatagggaagaagataaacatgttttttggaatgtatacagcgtgaataatggtcaaaacgtaaatggcttgattcaagacatgaagaatgttgtcggccgtggatttttggaactatctattgcaacggatcatttgatcgaggatttggacccgttggataattttacggtcatgcggagaaataatgatatgttcattaagcctttcgagggcgaaatgaatgtcggaaaattggggacaagttcttcaggtccctatgacattgctgttgttaatggtttccttcataaaaggactcaatacgaggaggtaattacttatggtgtcggtttggttttgagtgatctttcggatgattattatatcacagaatataagtatcgttcaactagacctaggggatatgaaatttacggtgtcgcttttgataagaaaaatcagcgttttctagctttcccatctatatatggtgcagacaaaaataacttgcgtatttttaaacgtaagtctgcagatggcaaattggatccgaacaaaccgggcaatgtagattgtaaatacattggttatggaccgaacaacaccttgtatgcagttatacagaatttggattcaaaagtatatgaagtttgggagttcaatttggattcggatgatgaaagtgcggataatgttgtgaatagacgttatatattggatcaatgtccggacattgataaagccatatcttttagttcgcaagcgatggagagtattttgtattacgcaaccgaggataaggtatatacagctttgatgacttcggaacatccgaaagcttatccaaagttctcggcttcatacactcacgacggaattacggtttctaatgagaaaatcacggaaatccgggttgtggatgagtgtcccggaaaggttgaaatccccggggaaggaggagaaacggaaacattggcctccggacgtaatatgattacggttgtaacctataatgatgtaacgaaggaagggaaagtcaccgtggtgcctattcggtcattaagtaccggagaagtagtggaagatcctaaattctatcgcgtatacgatgggttcgggcgtgttttaaaaacaacttgtttccatactcgttaaattgtagcataatgaaaaagataaaatatattttgatgttgttattggcaggtatttggatcagtgcttgtcaggataatgatgatgtgaaaccttcgaatgaagggttgaatgaatttagagtaaaagaaattgtcggtcgcaacgatttgtggggagattttaaaataaacttgaactattcggatgatcgtttggatattggagttgtggttaacaaagatcaagatactatcgctaatctgacaaaaggaatggttattatgaaggttccggctctttcacaggaagagattgacatgctggagccggggagtgaggtgcctatgacaagtaggattatttatcaagtgaaccggacaactcgggaagaatcgattactcattataaaagagaggatttgcaatttacttttgactatgaggaaaattatatttatgagtttgacgataccttgtccatgaataagaaagtcatgaaatggcgttgtttcggggaggctgactgggaaattcctttaacccgaatggtatatacgtatgaaggaaaccggatagagcggggagaatatgcggtttatgaccatcaatggacagtgatttctcattgggattacagttatgacggagatcggcagacgggggtgaaagtcgtgggaactaacggggaggtgaatatggaaaaagtgtttacctatctggcagatacaaaaatgaaggtcgtgacaactcaggctggaaaatctcatgaggtaacgtatactttggatgtgaatggatacgttgttcgcgtagaagaggaaaacggaaattatatggatatgaaatatgaggcgggacacggaaatttcagtgattttattcctctgtcggtgaaattacaaggtgaaccttgtaatttcaccgacagaggaataaaatc

SEQ ID NO: 551 - DNA, 2547 bp, Butyricimonas faecihominis
gtatcttgctgattggcgttttctatacataaatatcaggataaaagttgtacaatcataatgagtttcgctttatagtataataaacaatatattgtttgttataggtgaaatacgaactttacaaataatataatgatgtttagtatttcaatgcccaataatgtagccaaagcaaattacgtcaagagtaaatttgaaaattgattcccgtaatccatcataaaatgaactaaaaccgctatatttgcatattatatgatatattaagctatgacgaaaagaacaatgggtaccaagttgccaagaaaattggagcagaagatgaagatagtaggtgagcagatcaggctggccagactacgcaggaatctcagtattgcccaagtcgccgaacgtgccacctgttcacctcttacggtttcacgtatagagaaaggtgtaccgacagtggcaataggtatttatcttagggtgctttatgcgcttcaactagatgatgatattcttctgcttgcaaaagaagatgcaatgggaaaagcattacaggatttaagtcttaaacagcgggaaagggcatccaaaaaagaataagatatgaaaaaactctatgtatttgctgattttgattggcagaaagaaccaaggctaattggtgagctgaattacgaatcccttcgtggctctgacagctatggattttgctataatgatgaatggctcaaggactatggaggtctgtttcttagtgatgacttgaacaactatcctggtcagcaatacacggctcccggcaaggatattttcggatgtttttctgatgcccttccagacaggtggggacgtacattgataaatcgtcgggagcagattctagcaaaggaagagaatcgtccgatgcgtcggctttcttcattcgactatcttatcgggattgaggacttttctcgcatgggggcttttcgattcaaggagtctataaatggagattatatcaatgcaagcgaaatcctgcgcataccaccactgacagatattcgtgagctgattgcagctagttccgaaatagagaaaagtgaagatgagaacaggttgcctgaaatgcgctggattgctcaactggtccaacctggttcatcccttggcggagcgcgtccaaaggcaagcgtaattgatgagaacaagatcctgcatatagcaaagtttccatcccgcaaagatgattatgatgttggactttgggaacatttctcacatctgttggcaaagaaggctggtgtcaatgctgcagaaacaaaagtaatctctactagcgacaaatatcatactttgctttcccgacgatttgatagaagggaagacggtaagcgcatacattttgcttcagccatgactctattgggcttgaatgatggtgacaatgctaataccggccatggctatctggatattgtcgatttcatacttcagaattgtaccaacgtggaggataatctgcaagaactgtatcgcagagttgcattcaatatctgcattgggaatagcgatgaccatttccgcaatcatggttttcttttgactgcgaaaggctggacactttctccggcatatgatatgaatcctactttgaatgagtttcagagtctgcttgtctcatcaacttccaataaggcagaactgggtattttacttgatacttgcgaagattatatgcttaatcgtaaaatagcggaaaaaattatttctgaggtaattgaagttgtaaaaggatggcgagaaatggcaacacgattgggtatttccaagagagagatggaactgtttgtcggagtgttagatgtaaggtggaaagagtgcgtttaaccaacaaatgtttttataatatgcatattatgtctgatgatattatttataatggcatgacttggtttcatgcagacttccatttacatactaaatctgaaaaagcatttcagaaatgaagccaatagactcgcaaggcatacttgaggaaaagaaaaaagtaattagtaatataatttacaatggtaaatcaaaataatcagattaaaatttctgctgagacgagacgctctatatttaatatgattatgtctcatgcagatttcttgggtgtattccaaggaggtaattatgaagatcaaaacattgttgatttcttgaaaatgatatgggatcttcctgccatgccttcagaagaccctcgtttcaagaatgcagaagctgatgcaaggcaacatttgattaataatgatgattgggatcttacgtatacttttgagcaacgattcaatttgttggcaggtgatacaaaacacttcattaagtttgttgaagcatgcgtttctccctttgttagagcatcttctgaagagataatgcaatatgtggaagagattaatcctttgctaaatagagataattgtgaacttgccatagaagattatatagatgacagaccccattatattataaaatcaggaactggtttttcatttgatcgtaaagatatacatagcaataggt

SEQ ID NO: 552 - DNA, 2541 bp, Butyricimonas faecihominis
tggaagtgacctttgccaagacggtgtgcgcccataagggtgagtaataaatatctcctttgcaagagattaggttagagttcaaatgagacctaccaccatccgacttatccggaggggaaacccaaaagggagcatagcatgtcggaaaagtcataagtcagccagttgccaagctgcgactgaatggcaaggtggaaagacaaatataaggatgaagcccgaattggttaaacgacagtcctgttgcaccttagcgagcaatgacggaaggcaactacaaacgtcatgtcgtagttctctgacggagtaccgttacgttcagagcaaaagaactaactacgaaacaaccgcaataagcggattaatggacggaaatcgcatccgacaatttgtcaagcaaatagttattacttatctaaatggggattgcctaaatcagaacgccgcaaggctatggagaatagctcctgaatatctgacatggcaacggagttcccatagtagtctgagcaagggaaagccttgtacatggcaaaggggaacagttggattactttaatataatcaaaagataatgtgagagacatgagaaatccagagacaatattaaacaatttagtgaaacatagttctgtttcaagttataagtatgaacggctgtatcggattctattcaatgaagatatgttctctgtcgcgtaccaacgcatatatgccaaacaaggtaatatgacacccggtacagatggaaaaactgtcgaccaaatgagcattcaacgaatagaaaaacttattgagagtctcaaaacagaggcttatcagcctaaaccagcaagaagagtgtacattccaaaaaagaatggaaaagaaagacctttgggtattccttcttttgaggataaattagtacaggaagttatccgaatgatactggaagccatatatgaggaacactttgaatatacctcacatggctttcgtccacatcggagctgccataccgctctcacacaagttcaagaaaagttcacaggcgttaagtggtttatcgaaggagatataaaaggattcttcgacaacatcaaccacgacattcttgtggatattctaaaagagcgtataagcgacgagcgtttcttgcgcttaattagaaaatttctgaaagctggatatattgaacgatggcgattccaaaacacgtatagtggaacacctcaaggtggtattatcagtcccatactggctaatatctatcttgacagattcgacaaatacatcaaggaatatgctgaaaaattcaataaaggtgaaagaagacgaataagtttggaataccgtagactcaataacaagaaaacaagacttgcaaagaggctgaaatcaataacggatgaatccgtgagggataaaatgatagcagagataaaagaaacgttggcacaaaccttcgcaacaacctgtcaagaaccaatggatacagaatacagacgaatccagtacgttagatacgctgatgatttcttaattggaattatcggaagtaaaaccgagtgcattacaatcaaggcggacattgccaaattcatggcagaaaagctaagattggaactttcagaggaaaagaccctgataacaaacgcacacgataaagctaaattcttagggtacgaaatatttgtccgtgactgtagctttaggcataaggatagaaaaggtgtgataagacgcttcggaaaaggttcagtcatgctgcatgtaaacatggatacagcaaaaaacaagcttttggaatatgatgctttaaggatgtcccaagaacggaaaaagacggtttggaaacccaaaccacgtgcctttatgattggaaagaaggttgaagacatagtagctcaatataataccgaaataagaggattctataactattatgccattgccaataatatctccgacattgggaactcattcggatacataatggaatacagtatgtataaaacgattgcccagaagctaaatctgacaatggtacaagctaaacttaaatttctgcgtgataagaagtttattgtgccctttaaagatgccaaaggtgcaaccaaatacagaatattctatgatggaggcttcaaaagaaaaactgcttacaggaatagtcttgtagatattattcccaacacatggcacatttcgaaacctagccttatggaaaggctaaaagaaggtgtttgtgagctatgtgggtcaaacggtaatatcactatgcatcatgtgcgtaatcttcgccaacttaaaggagatacgccatggaatgcaaaattgataaaacaaaaccgtaagacattagccgtttgcgaatcttgtaattataaaattcagaccaatgaacactaagttgagtgaatccaatggagagccgtgtacatggagacatgtaagcacggttcgggggcaggctcttgaaaacctaccgtcgaaagacggcaaggcattgagtgccgagcctacgcatatcatcttccccgccgccgtccgcta

SEQ ID NO: 553 - DNA, 2529 bp, Butyricimonas faecihominis
taatcgattataatcaatttaactatttgataatcaagtatttacttaccgatgcaaaaattcttaaatatatttcccaatacctcatccgtcgtgatttgtcccgtgatttccccgagataatgaaggcattcccgaatgtcttgtgatacaaactcaccactaagataggagtccagtcctgtgatgactcgctcgatggctaggcgggcatgggagagggcttcgtaatggcgggcattgctgacgataacatctcctgaatgaagagcgtttaggttgatcgtggaaactagctcgtccaccaagtgatggatgttatatccagtctttgcagcaatcgggagaatcttttccccggaagatagagatgtgatttgtgacaagatcatgttggcagaatctgtttggtctgtcttgttgagtaaaatgactaagcgggtatccggtccgagatgttctttcacttgggtataatagggaaggaattgttccgtgtttttggtggcatctattaaaaacaatacgatacgggcttgttcaattttggaaaaagtacgttcgatacccatgttttctacttggtcgtctgtgtggcggatgcctgccgtatcgataaatcggaaagtgattccctgaaggttaatcgtatcttcgatcacgtcgcgggtagtgccttctatatcagagacgatggcacgatcctcttttagcagagcgttgagtagggtacttttccccacgttagtgttaccgacgatggctaccggaattccgtttttgatcacgttgccgagggagaaggaggcacataggcgagaaattaatgtatcaataccgactgcaatgccccgtagttccgatcggtcggcgaactccacgtcttcctccgagaaatccagttccagttccaacagggaggtgatgtgcaacagttccattcgcagtttcatcagttcgtccgagaatccaccccgcatttggcttaatgccattttgtgggcggttgccgaggacgaggcgattagatctgcaacggcttctgcttgtgaaaggtccattttaccattcaagaaagcccgttgagtaaattctccaggggcggcaagccgtactccggaggagattaatagttgtaatatgcgttgctgaatgtatactgaaccatggcaagaaatttcgatggagttttctccggtgaaggagtggggggcgtggaacacggagattagtacttcatcaatcagttcctccttgttgacgatctttccgaaatgaattgtattcggaagaacatccaccagttttttatgggaaggtgaaacaaatatccggtcacaaatttcaatacatccttttcctgacaggcgaatcacggcaatagcacccattccgggggccgtggcaatggcacatattacagtctggtcattcatggtaatttctttcgtgcaaaggtatatcttttttatcgcgtatagactaaaaatgaatccaaatgagtgttcattgggattcatttttttgattctgtatttgcttataaaaattgcaagagtactgccccgcaagagtacccacccccgaacacggagagtgccacgaggtcaccatggtcgactcgatcaaggttttgcgataaggcgatagcacaactagggcatcccgtgttacctacttcctcgatgttcgataacatgtgatcttcggggaaatcgatctgacgtgcaacggtagccatgattcgcttgttggcttggtgtgatgcgatgaatttcaaatctgtcagttttataccttggctgttggttacagcatttaacccttcgatcatgtaatggcaggcattgataaacacgtcacgtccttccggcattccgatccccccgtgatgtgggcgtaaatatacggcagtgtctgctttaccgatgtggccaagtccgcgggtgaatatattaagtatgcgggcggctttttctccttccggcatagtggagatggcaatagccacagacccgtcaccccatagatgaccgctttgcggacacgtctcgttgctgtattccgtgttatgctcggatgccacgacgattgctttcgttgccttattcatggcaaaatacccttcaacgatttccatggcattgataaacgaggaacaggctgccgaaacggtgagacagcgtgcggctcgtgctttgaaatggcgttgtatcatgtgtgctgccgtggctacggtgtcgtgaggcgagtaagtggcggccacgatcaagtcgacttcctctatggggaagggtagtttttcattcaggcgtttaacggcctctagggccatggtatttgtgttctcgttttcgccagccttgctccgggtacttattccggtacgagtgcgaatccactcgtcgtccagaccgttcacgtccttgaagtaggagtttggtactcggtcatccgggagataatgggcgaaggcgttgatatataattccatataatagtgtgtgttagtttatttcttaattatac

SEQ ID NO: 554 - DNA, 2525 bp, Butyricimonas faecihominis
tgtatatattacatatggcttttacttagctttatatgataaatcaatacttgatccaacagtagatagagtagaagcatgggataaaggacctgttataactactgtacaagagcaatttaaatattataaaggagatattactggaaaagcctctattggagatgaaacaccagagttgacagataattctgttaaggctgtagcagatatggtatggaaaagatatacaggctatactgatcaacaactagttgatttattgcatagagaaggaactccgtggtctttatgttatagaaaaggagctaatgctacaattccagacttgtataccaagacttattatcttaaaatagtagaaaaccttcgtgcaagaaaagctaacgaacaatgaatgaagaactagatgatttagctaatgaccgtacagatgaagagacaattaatgaggatgatattgaacgtcaaataaaagcagagaagctcaacttaaaacggttagaaataaggcttaaagaggaagagttatcgagtaaaaaacaggatcgagagcagcgtaaaaaatatgttgataagatattttatttggaatgcgtctatttaactattgtcatactgattattgttgcattgggtaataaatacaacaatttttctctagataaagaggttataattgcacttataacaactacaacaataaatgttattggtctctttgtgatcgtagctaaatatctattccctcagaaataacaaatatactccttcttactttcaagagggagtttctttttaaaactctctgcaatggctagaagttagtgtaattatctgcggggataataacaaaaaaggactgacccgggatggcaaactttttttgtttgataattgattgataaccagtagttagtttcgcttaaaaaagctaatctctacttataagcatacatagagggtttcaataaccaactgatactgaagacaaaagtatataaaaaagtcggattgtaaaacactggaaaagaaccttcttttatcaatcaaggaaatcaaaaagtgtatagagcaaagtggcgcatgtatggtatagataattccgtacatgcgccactttcttaatcatctgatttgcattgatttacattaattgttattatatactatcatttggtactgataagcattgattttgcttgtggggtgtattattgtccacctaaaaaaatcaagaatatctccttgaaacgggtttgacgagcaggtcgatgtgctcgtgttcaaggatatgttccatagccttgtatatgggcatcttttcgataccggcaatcttcagggcttccatcttgatggtattctcgatgagcagcaggtagtcttcctccttcagctcaacatatttctgtgactgtgattttaattttgccatattgatgttgttatttgtttccgaagtcggcaggaatctcaccccacaggcggttgtcccagtgcagcacttcgatgtccttgattcttgcctccatcactttgaggaatatctccgctttctgcaatgccgggcatctgcgtgaagaggctgtctgtttgttacaataccacgtgatggctgtaatgctgtccgagtagattgtttgcggactttccggatgttccatgacatatctgaccgcctcgacaatgccgagaaactccccgatattgttcgtccagttaccgatagctttggaaaagagttcttttcctgaagagaggtcgacagcccggaagcgtgtcaacctctcttttgcagaatgggcaccgtcggtcgcaatacccacgaccggtttttctttcattgaattcctccctgatgtctgtctcccgtatagatgaacccgtcggattccatacgtcgtaccagagcacgcgcctgattcagatagtcggtgatgacaccttccttgtacttgatatccttgcgtcccttgaggatttccagcacaccgtctattgtgcggctcattacgctcttgccgtctttcgggtcgaagaaaatctttttgttgccgaacgtcacagttacttgatacaatgtcttcgggacgatcactgtttccacatgcgcctgaaataacacgggggtagcggcaacgactacatacccgttggctttgtgcatgggtttcaactctaccgagtatagtatgtttggctcgagagttcctttcaggtcttccgaaaggacacaaatctgcttgccgaatcttgagtcttcacggactcccatcaatttacgtgtcttggaatggcgcgaaacgaaccctatcagttcgcccgtctcttccgatctcgcaaacttcagttgcgatttttccgatgtcatattactgttctttcatattcaatctattgctttcaattgacaatctgttttcaatgggtcacttttccatacaaatatatgccaatttttcacgccaacaaaacgttttagttattaattttcagatggttatgtgtaatatatatagaga

SEQ ID NO: 555 - DNA, 2522 bp, Butyricimonas faecihominis
gtaatacataatatcatgaaaatgagaaggaatatttgtatgattttgttctccgtgctgtcaaccgtgacagggatgaattgcgctaacgcgcaagaacagaaatccgatggaaataccaatgtaccgaaagtgtatatgttcaaggagatttccccggagaatttggtgaagatttacgaagctttaggtcgggaggcaacaggaaaagttgccgtgaaattatccacgggagaaccgggtgggcataatttcctgcaaccggctttgatcaaggatttggtgcagaaggtgaagggaactatcgtggaatgtaacacggcttacgggggtggacgtgccgataccgaaaatcatttgaaagcggctaaagatcacgggttcactgccattgctccggtggacatcatggatgcggagggagaagtggcacttcccgtgaaggggggtaagcatttgaaagaggattttgtcggttcgcattacttgaactatgatttcacgattgttctttcacattttaaaggccacgcgatgggtggtttcgggggagctatcaagaacatatccattggtattgcatcctctgccggaaaagcttggattcattcagccgggaaaacgaaaggcaacccgtggggtaatttgcccccgcaggatgattttctggaatctatggccgaggccgcaaaggcaatcgtagaccattgtggggacaagattttgtatatcagcgtggcgaataatctttccgtggattgcgattgtgattcttccccggaagatcccaagatgggagacatcggtattctggcttctcttgatccgattgctttggacaaggcctgcacggatttggttcgggcttccgaagatcatggaaagattcatctgatcgaacgtattgattcccgtaatggaatgcacacgttggaatatggtgaaaagatcggtttgggaagtcagaagtatgaattggtgaaactggattaaagaatataagagtatgagaacgacaatagtaaaactttattcattggaatataatcagttgaggacctattgggccgtgactttattcgtggcgggtaatatgatcctgccgcagttgtgtcacctggttccgcagggtggtattcgctggttaccgatttatttctttaccctcgtgggggcttataaatacggttggaaggtgggtttattgacggcactcgtttctccgttggtaaattcggctcttttcgggatgcccgcggtggccgtgttgcctgccgtgttgctgaaatcggtgttattggccgtggctgccgggtatgcggcaacccgttttcggaaggcctctttggtattactcgtgggagtggtacttttttaccagatcgtgggaacgttaggcgagtggatgctggaaggtagtttttatgttgccttacaggattttcgtatcgggttacccggaatgttgatgcaggttttgggtggttggctatttattaaccatataattcgtaaatagagtatgatgaattcattatttattggcagtgtcggtatgccggaagtgctgcttatcgtgttagtcgtgttactgttattcggtggcaagaagattcctgaattgatgagaggaattggcaagggcatacattctttcaaagaaggaatgaacggggtggagaaagaaattacttcagaagagaaaaaagagtagtatggaacaagtcggtaagtctgagaatcagagtttttgggaacacctggacgtgctgcgggcctcgttggtgaagattgccatcgtgaccgtggcttttggtgttgtagcgttctttttcaaagatgagttgtttgctgttatattagcgcccaaagaggcagattttattacttaccggcttttattttcgcttagtggatgggtgacgggtgccgaatccccggactttttcgtgaaattgatcaataccgggttggcggaacagtttttgatccacatgaaagtggcgatgtgtgtggggattttatgtgcatccccttatattttgtaccaattattccgtttcgtgtccccggctctctactctaacgagcgtaagtatgtcgtgagagtggtggggagcgggtatgtcatgtttatgctgggtgtcctgcttagctattttcttatctttccgttaacttttcgtttcttgggaacttatcaggtgagtagtgacgtggagaatatgatcgcgttgcaatcgtatatcagtaccttgattttgatgagtcttgccatgggaatcgtcttcgagatacctatactttcgtggttatttgccaagctgggatttatctctgccgattttatgaaacgctatcgacgtcatgccgtggtaattattcttatcgtggctgccgttataaccccgacatcagatatattcacgttgtcattggtggcgttgccgatgtggttgttgtacgaggtgagtatttggattgtgaaacgtgctgttcggtaaatatgaaaagtattattt

SEQ ID NO: 556 - DNA, 2512 bp, Butyricimonas faecihominis
atataaagctcattataataatttagaacaaaaatcacatttgtcgtttaggaaattgcttcaaagttatgatgatgtattttatgatgccaagcgtattgctattcaaagtttttcaagttatgtatctaaacaaagtagtaatattataattgctacagttataaatctatctacggttacatattttggtaattatatgatgttattcaataatattaatatgatgatttggactgtaatgcagaatgtttgggctggagtgggggatttggttgttacttcaactcgtgaacaagtttatcgagtatacagagaattgttggcattgtctttttatgtacaaattattattgcatttggcttgttagttctagctcaagattttattgcattatggctgggggaggaatatgtattagctcccactattttgtatcttcttgttgcttgtcttacattgggtgcatttacaaatacaaacacttgttttttggccgcttatcgtctttttaatgatgcttggatatctattgttgaagcttgcttaacggttggtttaggaatcttgtttgcattcaagtttggcgtttttggtgtcgttggtggtatgttagctggaatttttttgctttttctatggaaaccatattatctttatcggaaggtatttcctttccctctcatatcgtactttcttattgtcggtaaaatgttttttttctcgataattatttacttaggagttaatcaatggattgtgagtcctttgaaggattggttaaatgtgagtaatttgggagaatggtttgtgtgggctttggggtctaccagtgtttatgcggttgttttaggtatatttttatatatctttgacacaggtttctctacttttgtgaaacgttttatttcaattagaagaaaagtataatgaaagaggttcgtgtccgattttcagttattatcccgctgtataacaaggaggcgtatatagagcaaactttaggttctgttttagcccaaacatatcctttttttgaagttataattgttgatgatggttcttcggatgctagtttgcagatcgtgaatggaataacagattctcgaatacgagtgatttctcaagttaatagtggcgttgctaccgcacgtaataggggggtaaaggaggcgaaggaaaattatgtggcttttatggatgctgatgatttttgggctcccaattatttggaaaggatcgcttttttaatttctacttgtcctgatgcgggaatatttgcttgtcgttatgttgaaatgatgaatggcaatagaaaagctgtttcgattgatttggaaacgacatttgagtatggatatatttcttattttagtttgtatgcaaaaacttttatttctcccgtgtggacttctgcaactatagttctccgtgatatatttttgaaaaatggaggttttaatacatcactaaaaatgggagaagatattgatttatgggttcggatagcgttgaaagaacctattgcttatttaaatgaagagcttgcatattataataatgatcaaattatagagaatcggctttcaaagaaattgtacgcacccgaagaaagttatatattttctttggatacattgaaaaaaggcgtttcaaatgattgtcttttcttattagatggattgattttgcgtacgttacgtccttattatgctttgggattttaccggaaagaaacggatagaattttgaaaagtgtgaattttcagaatcatccattagtttatagggtatattatcacttgcctcggtggatggctaaaggaatatatttgttgttgaaaaaaatgagagcggtactatcatgatatgggtaaataagaatgatataatattaaaaatcataatactctcggcgatagttttcgtcttgtctgggtatttgttgatgggttgggataaattattggtttatacattgttggttgtaaatgtccttgtcatgtattatgtccggaacatgcaagtgccgatgttgatgtttattttcatgtttacttataatgttcattatctgtataattgggctggaattcagttaagtccttatgaacaatttcagagtatggaatattatggcatatcggcaatgctaaatttgctagtattcgcaggagttattttagttgtaagacttaatggtaataagactcgggaacgaacgactttttctttcttaaaagagaaagaaaaatcttttgtatggttttgggtttgtgttgcagtttgtattttgattttgtattatttacagcgtcaaggaacaaatttattatttgctgaaggagatttatatgatctttatagggaaaatcttgaaagtataagcggctttgccgtgtatttttatattttctttttcttattgtttatttaccgtccttctcctatttacaatattgttatcggttttatattagcttggtatcttttgtttgcattatctagggg

SEQ ID NO: 557 - DNA, 2486 bp, Butyricimonas faecihominis
gtttgtaaggttcgtaaagtttataaggttgaattcacgggagatttttggacaaaatttatcgacagctctgctgtcatgaacaaagccccgcaagggtccatagactttatggaccttatgaactttatggactttataaactttttcatgattaattttcaattactagggcatcagcgaccaattccgccactgtctttatggtgatacccagtttgtacgtgtgattaatttgagttagctggtccacgcaattgtggcacggggtcacgacgatctcggctttcgttgcggtgatttggtcggctttgattttgccgattttgagacgacgttcgttgtattcgctcattgcgagggctccgccaccgccaccacaacagaagttgtccgtgccgtagggtgtcatttccaccacgtttgctgccgcggcattgaccacgaaacggatttcattgagaagtcccccgtttcgaaccaagttgcacgggtcatgtatggtgacaaccttgctattcagcgttttgtcgagttttattcttccactccggatatattccccgatgagttcaaccaccgtgagagtgtcaaaatcatactgtgttttgagataattggggccttcccagcgcatggctctcgaaccgtggccacattcaccgagtacgaggcgtttgccgtgcaggcggtgaatctcgtcgtaaagattccgggcaatttgagttgcctcttcattattaccgttgaaatacccgtagttggtcacgtcgtagtatttagacgagagggtccactcttctcctgcggcgtagaatacttttgccatggctgagatggaaagcgggaagaatttcggttcccggggattcaaggtgtaaaaaacgttcttgtcgggctgatccagaaagattccggctttctcgtcttccagttcgtcttggagttcctcttccatccattggatcgtgtcaacaaactcttccgtgggaatacccatgttgttccctgtgttgaccgccgcgtcgacagttgcttggagggttttgggtacgagtcccatgaccgcaagcatttcacgtccttttttcacgaggaagggaatgtccaccccgatagaacagtgtttcacgcagcgtccgcacatggtacaagccccgaacagggagtcgaccatctcgtcgcatgtctcttggttcagttcccgggcatggaataacgacgggaacatggccccttgccaagtcttgtagcgtcggtaaatggaactgacgaggtcaacctttcgtgccgggatgtatttgccctctttcatcgtgaggtagtacatacaactcgatgcacacaaaccacaacgtacacaagcgtttagatgggtctccagcttgctgtcattcgtgtttgaaatgatggcgagggctttggctttttgttcgttcgtgatattatttgtcatattgaatcgcttttttaggaggccatgttccacgccagccgtagaaaaagcccaaatgataccttgcaaagaaaaagtaaagcacgtgtttgattttgcccaagggcatccacacgaaaagaagtgccattataacataatacgctgccccgaattgtaaggtcagcagggagtaggtcgtcaggaagagcatgatggtgcagagaagattagaaatgtaatcatctgcgcacgataggtctctcagctcttttttggctagtcgcttgatgaataaagccaatccgcaaacggcagcaataaagatgattgcagccaagatcatgacgatgaggtttgttgtgctttcaataggaatctgaaagttgaaaataaccgcaagcgtgaaaagaaggtacacggctattgccaggaagtttcctatatgaaaaaatatacctgccgtgtaagtgggcaggtgtaagtatgctgattctttttgcataggtgacatagctccgatacaagagtaacagactgcctgggtaatattccctgacttttgcgaaaggtccttgggagaaccgtgttttaaaagtcgtacaaaatatccccccagtagtactacacaaaaaagaagtgcagctaacgaggtccaaatataccaagacatggtcgtgggtattagacgcacccgtcgggtttcggtaacccggccacccgacacgctcctcgggctggtcctaatgggaacaattcataaatgtctttcaattttaatccggtctctttacagatggtacgaaccatcggggcattccccttttcttcaaaattatcacgaatgattttgataattgcccaatgtttgtcatttaattctgtgattccatctgcctcggcaaagagttttgccacgtcttcattccagattgaaggatcggtgaggaaaccgtctccgtccacttcgaacgtctttccttgaatttctagtgttgccataatgtttattggttttagattgatttgcaatataataaatatttgaaac

SEQ ID NO: 558 - DNA, 2484 bp, Butyricimonas faecihominis
gtataagttaaaatgtaaagatgtacacttatctcaatataaagttcgtgcttatttttcagttcctgtttgtaagttaattcgtaaagatattattggcgaacgaaggtttaattgttgttttaaaaatagtgaagatgcgttgtttatgttagcgatttcggataagataaatgatatggcttttacaagttctaaagcaatttattacagaagaattaggaataattcggctacgacaaaaaaaaggtcctttttttatctattgggagaagattgtaagatattgattgaggttagtaagatatggtgggggcatccatttgaatataatttgtggttgtttttgacgaggcctttagctttgcttaaggcgatgtattattcttttttaaataagtattaatttataattgtcatgaatatagctattgtaggtacaggttatgtgggccttgtatcgggaacgtgttttgctgagatgggggtaaatgttacttgtgtggatgttaatcaagaaaagattaattctttattgcgaggtcagattccaatatatgagccgggtttagaatttttagtagagcgaaatgtaaaggctaataggttgcattttacgacggatttaacttcaattttgcatgaggttgaaattgtattttgtgcagtagggactcccccggatgaaggtgggaaagctgatttacgctacgtgttggaagttgctaaaacgttagggcaaaatatcaataaatatttggttgttgtaacgaaaagcacggtgcctgtaggaaccgcaaaaaaggtgaagaaaacaattcaagaagaattagataaacgtggtgttgatattggatttgatgttgcttctaatcctgagtttttgaaggaaggtaatgcgatagatgattttatgaaaccggatcgagttgtcattggtgtggacaccaagcgagctgaagaggtaatgactcgtttgtataaaccgatgatgttaaataattttcgggtgatattcatggatataccttctgctgagatgacgaaatatgcagcaaattcaatgcttgctactcgaattagttttatgaatgatattgccaatttgtgtgaattggttggggctgatgtgaatatggttcgtcaaggaataggaacggatagtcgtattgggagtaagttcttgtatccggggtgtggttatggcggctcttgtttcccgaaagatgtgaaagcattaatacaaacagcagaggagaatggatataatatgcgggttttgaatgcggtagaggcggtaaatgaaactcaaaaaaatgttcttttcgagaaattcaaaaaatattttggtggagaggtaaaaggtaaaaaggtcgcaatttggggattgtcgtttaaaccggaaacggatgatatgcgagaggctccagcacttgtgttaattgatagtttgttacatgcgggttgttcaattaccgtttatgatcctgtggccatggatgaatgtagaagacgaattggaggaaaagtgttatacgctaaaaatatgtatgacacggtggtggatgctgatgcaatcttccatgtaacggaatggaaagagtttagaatgccgagttggcaggtgattaaacgttcaatgaaagaaaagcccgtgttgatagatgggcgcaacgtgtttgatgaaaaagaactgggcggtattgcttatttaagaataggttaaggtaatattcgaacagaatgggagagttagtttcaatcataactccagtatataattgtgctaaatttattgcagagacaataaattccgtaatcgcccaaacctatattaactgggaattaattattgttgatgattgttcaacggatgatacggaaaatgttgtgaggtcgttccaagatcaacgtattcattattataagaatgtggaaaatagtggtgcggcaatatcaagaaatcgggctttgcgtgaggctaaagggagatggatcgcttttctagatagtgatgatttatggctgccgaataaacttgatagacagattaagtttatgatggataatcatattagtttttcttacacgaatttaggggtgattgatgaagcatcaaattctttgaatcgagttataacgggaccaaaacatatcacgaaatttggtatgtttaattattgttggataggatgtttaactgttatatatgatatgtctgttgtggggcttatccaaatcgcagatataaagaaaaataatgattatgccatgtggcttaaagtgatacagaaggcggattgttatttattaaatgaaaatttggcgagttatagagttcgtactggttctattagccgtttaaagaaaactagtttaatccaatggcactataaattattccgggaggtagagaaggaaccagtaatagtggcagtttttaacactatgcgtaatttaatattcggagtgataaaaaaatgg

SEQ ID NO: 559 - DNA, 2479 bp, Butyricimonas faecihominis
tatttacactgcacagcttctatttatcactcatcagcagaagcaaaagtattaaatgataaatatgataaatttattgttggtagtgatcaagtatggaattatgaaaataatggtcgagattttgcttttttgttagattttgtcactgatgatgaaaaaaaaatttcttattcatcaagttttgggttaagctctgttcctaaggatttacgcaaggagtacaagtacaatcttttgaaaataaaatatatttcggttcgtgaacgttatgcagtgaatttagttcgagagctatcaggtcggtgtgccgaattggttttagatccagtcttcttattaagtagagaagagtggcaacgatttttattaaatcgaccacgtagtaagtatatatttacttatacgaatcaaccagggcaagtagagcgattttttaatcaaacaggctatgatatacagtattttaaacattataaattggctcgggcaacatctttgttagatttcttatctagtcatacttgtgtaaagtatgcgatgtctccatctgaatttgttagttgtataaattatgcggaactcgttgtatctgcttcattccattgtatcgcattgtcgattattcttaacaagccatttatagctattcttactggtgatacaggaaaagacgagagagtattgagtattttacaactgcttggcttacaaaatcgcatatattctccgtcaatgacgttagaagaaataaatcttccgattaattatgagagtgtaaacgaagagatctttagattacggaaggattcatttcaatttcttattaatagtattgaaaaataataaattaaatttatgaataaaataaaaattgctgtaatcggtctcggttacgttggattacctttggctcgtcttttttcaactaagtatttaactgttggttttgatatgaatcaaaggcgagtagataccttgatgtcaggacatgatgtgacgttagaggtggcggatgatttattacaagatgctatccataatcatggttttaagtgtacgacccgtatcgatgaaattagtgattgtaatttttatatagttgccgttccaactcctgtagatgagaataaccgtcctgatcttaaacctttgtggggtgcaagtgaaactgttggaaaagttatttcaaaaggagatatagtagtatatgagtcaacagtatatccgggagtcacagaagaagaatgtttacctgtagtggaacgggtatcaggattaaagtttaatcaagatttctttgctggttatagcccagaacggattaatcctggagataaggaacatactgtagagaagattaagaaagttacatcgggctcgactccagagattgcagaggttgttgataagatttataattctgtacttgaaaatggaactcataaagcttcttctattaaagttgccgaggcttctaagataatagagaactcacagcgtgatgttaatatcgcttttatgaatgaattagcaaaaatttttaatgcgatggagattgatactcacgatgtaattgatgccgcttccagtaagtggaattttataaaattaagtccagggcttgtaggtggacattgtataagtgtagacccgtattatttaattcagaaagcccaggtttatggcgttttacctcgagttatgtcaaatgctcgtcgtttgaatgatggtatgggggcgtacgtagcaaaccaaactattaaatgcatgaacaaaaaaggggtaatagtaaaggattctagaattttgattcttggtattacatttaaggaaaattgtcctgatattcgtaatacgaaaatcgttgacatttatcatacgttcgaggagtatacgaataatattactatttacgatccgtgggcagatattgatgccgttcgtcatgaatatagtcttgaaataattaatgttctctcaggtagagagaaatatgattctattattcttgctgttgctcatgatgagtttctaaatcttgatattcgttctcttctagcgtcagaaaatggggttgtttatgatgtgaaaggtgttcttcctagaaaaattgttgatgcaagattataattaatgatgttatctattgtttgcccgatatacaatgaagtgaggtatattaaagggtgtatagagtcaattgtagcgcaggattatcctaaagatagtttggaagtattgtttgttgatgggatgagtttagatggaactcgcgatgttgtacagcaatttatgtctttatatcctttcattaaattattggataatcctaaaaaaattactcccactgctttaaatataggggttactgcagcaaaaggttcgattatttttcgtttagatgcacatgctatttatcctaataattatttctcaatattggttaaataccttgaagagttgagagcagataatg

SEQ ID NO: 560 - DNA, 2475 bp, Butyricimonas faecihominis
gtattcatgaattgtttgaacttgtgattgtcatccaatgcccagtactttattcccaagtataaccatctaaattcatcttttcttatattttgaagtttgccttctttttgtgttaataatttgctggctagtaaagtccagtttatataacaaccaagcaacttgattctctttaagaatatttgagtatcataggtggtagtattgatcattctttccagttcatcccaattcccctctatttcttttaatttttctcttgcctcaatcaagaaattgcttctattctcttttctttgtattttttcttctttcttgatttcatttaaactggaaatttcctttgctgtggacttgtctgttttcatgctgatttcacccacttcatgtttttccaagaggtattccagtcttccttcacaactgtacaggtcattgattaattccattttctcacataggctgtctattagaagatgtgatatttggtagttgccatgaatatcttgccttacaagtccctctactccttttatatcaacctttttgattgcatcaataactttttggaacaaatgttgaaatctaggctggtctccttcaatctttttcaaatgtgtaatgatgtgttgcaaatgtcttgcctcttctagtaattcaagcctgtatttttgaacatccactcttttcttaacaggcagatagttatggatgatggtgtcactcaagagttgctttctacacctgcctgcaatttggatgattttctcaattgataatagtgattgtgttttttgagtattggcaacagaaataaggtgaaagtcttcatcaatatcaactccaacaaaatatgcacttgtgatgaaggtgatctgcttggggagtctattaccttttaattcaatataatattctccaacttcttttctcccatacattccacacagaactgcaattttgcctgaaatctcatctcccccttcctgttttaatagttctattatgttttttatacatgatatggaattgtaagcaatcatcaccttctgggaggaatctcttgttgtggataaaatttgttttgctgctgttatgtctggacaagaagaagtaatggatgttatatttctagcttttggggaactaaattcagcatgtatgatgtcaatacctgcaagctggggattggaaaatcctttaagtgttgcagacactagacacctgctttgagtgggatgttcaagataataatcaataacatcttcagcaacaggcctgaaactgctgtctgattgtaaagaatcaatctcatctatcattaagaagtaatcttccaagttttcacccctatttttcaagtaattgataactaggtgaaggctgtctgcaaccaccaagaattttttgaacattttctccttgttgttgatcatgtccatgtattcatttatactactgttacttgttgtagtatttagggagccaataggacttccaacatacaagtacttgtctggatggttcctatacttgttatatgctagtgctcttgttgggcagacaatgatggaatttctctcacttctcaattctaatgaagttgccccaaccccagttctgtttttgttgaatatcccaaaaggtaattggtcaataccttccaagtattcagattcaaaaattagaatccctttttccctttgatgagatgtgttatcttcatccccagaatttgaaatgggttcaacttgtaaggttacaatagaagggtctatgattgtgcaattgttaataccttctagaatttcagggtttgtttcatggagtggagtactgtttattatggcctgaagtgtttttaatttttcatcactaggagtagtgggtggggtattttgttgtattttggaagtttcttttccagatgaaatttgttttgccagtaggtgtgcctgttgggtctccctgttctccttgacttgttgctttattgtttcatattttactttagccagagccttttggggggagttgttatcatggtttgagttaatagcttctttctttatttgagtttctttgaacttgctcatgtctacccactcatgttcaatattttcattaatctctattgatttttcaattttattgtgatccataatataaaaaaatgtaggggtcaagtgaatttgttacatgaccccaatgttaataaattttagagtcataagctaccatcaaagcaaatttttcattgctgcatcaatttctgaattttcaaagctatccagataaatttgtgttgttttcagatcagaatgtcctaaggattctgaaattataccaatatttactccagatctttttaaaacagtagcataagtatgcctagctacataagtagttaatggaaaattcaaacctattttctttctaattacttctaattgtgtatttatatgtcccaat

SEQ ID NO: 561 - DNA, 2462 bp, Butyricimonas faecihominis
aagaaataacgaataaattacctgcagatatgagatttaatatgaatggacacgattttgtgtgtatattattccattacatcaataagataaaaaatactgtaaattataagtatgaaaattttgaaagaacattctatttatctatccagcctaatcatcttgacgagtatgaattattcaaaaaaataacaacttaatatagagcaatttttaagtaaggcgtactgcgaatttgttgtagcataagttagagaacctaatctcaattagagatgttatttctctgttctttttcactagcacttgtcatgccttcggtggcttcgtcctgtgttttagccattacgttgaaaaatttgctatccgtgtaactgtattaatccattccttgagaacctttaaacagcattctgtgattttttcttctcccggtgtttgggtaatgcttaccccgtttttgttaagtgactgcatgatgttctatttttttatggttataatatcagcaagaaaagcaacgacaggaaaagcagagccacgcccagcgcataaagggctgaaaggcagacacggaacaggaaacaggcggcacgaaatacgatatacgccgttatcgccgtgcctgctccggctacgctggtgaaccgccatgcaaggcagagcaggaacacccgccaaaggattttataaatgcttttccgtttcatcgcttggtcgtttttagcgggcagggctttgacaccccgcccggattggtatttgattatgccgctcggaacacaaaaccgtcttcaaaccagtaatcgcacataaacaggtcacgggcgaacttttcataatcgaaataggtctttgcgaactccggcaggttgtagcattcctctatgatttcataggcgaaatcttcttcatcgtcatattccccctgatactcgtcccggaaatcacgtacaaggtcgtccgcatcttcctcgttcaaatcatggcttttgtagttgcaccacacgaaaaaggcttcctgctcggtgtcgtccaaatcctctaccgtatcacgcagagaaaagaagttttcagaaatccagctttcgccgattaagccctccggcacgttctcccagtcttgaaacatatattccgcatcttcctcgtctttgtgcagttcccgacaggcttcgtaaaattcttccttgtccgaatagtccgacaggtcgagccatgcgccgaacaatgaaccgttgttatacttgccgtaagtgcctacataaacttttgcttccgataatacctttgcttccatattgctgtaattttttaagtttttaattttatgcggattcgagaggtgagggagcccaaagtttcactgaacttttttcctgtttcctgtaaatccgacttttttttttatgcgtcttccggtcgggtcggtcgttttcgtttcacataggctggttggtgaaggggtcttgctatgcaaatttttccgacaaaaattttttccgaccaacgggaagctggaacaatttttttcgatgaaacccaatttgcagagccaaaagcccccgtagctacctttgcctattgaaatgataaaaacgactgtcccggctgggggactgcataatgaggaagatttacagatagggaaacaggggaaaagtgcttgttccctttcgtcttttagggaacactccatgcgggcgggaaaggcaagggtatggcaagttcaccttgcggtacgcttgtgcgggtttccaacggctcttttcacgaaaatcagtcagccatgccacgcacggctggcgtttcggggaatgtgcaagtggaaaagggaataaaaaatgcgggtagtcgatggactgcccgcaaggtgaaagagtgtactttgttgggatatagcttgttaggtgaaaattcgttaccgaaatcgttacctattcgttcttgtcacggttataggtaacaaaacctaccggacggcgttctttctgttgcttcgactggcttagaagccgggtaagggcttgatatagctcgttgaactgtgcatcggtgcttacctccagttcttcaatgcgccttaacagttcctcgtagccgattaccatttggcgcatgaggacgaaagctcgcatgattgaaatgtttacttctatggctactttggaacggagaaccgaagaaagcatggctacgccctgctcggtgaaagccataggcggggtgggcgtgtgacggatgttgtcagggaacttatcacaatttgtgataagtcccaaccactcgtctttactcaattcaaacataaaatcaccggggaagcggtctatattacgtttgaccgcctgtttcaaggctcgtgtttctacttggtagagttccgccaaatgcaagtcaagcatcacccggcaaccccgtacttcaaaaatcttgttttggataatctgtaagtccataat

SEQ ID NO: 562 - DNA, 2456 bp, Butyricimonas faecihominis
ccttaaagaagagcaaaattccaacgtgaaaaagggaaatctaaatatttaaaatatcaataatggaacgtttaatgcgattttataaattgtatactgatgaacgataaagaaatgttattcaaaatatccttgttgatttccaagagtttatctgggaatatcacgaaagaggaacaagccgaattagattcgtggcgggaagaatccgaatataacaagaagttgttcgagcaaatttgttcggagacggtaatgcgtgaaaaacttgctcaatataagagtgcgaacgtgcagactgcgtttgatacctttgttaaaagaagagagaaactacattctcgtcaacgctggataggaaagttatcccgttacgcggctatttttatcgtacccgtgttggccgtggtgttttattatagccagagagagaacgttgaaataactgaagaaccacaatccaagagtggggtggttacggttcagagaaatttgccggtgctgacgctttctaacgggaaagaaatggtcttgtataatcaggagttactgttggaagaagagaacggggtaagaatttcggtgaatgaagagggacgtatgcaatatgaccgggcggattccgtgggaacggaaatagtatataacacgttaacaacgccttcgcggtgtgattttacgttcactttggcagatggaacaaaggtgtggatgaatgctaaatcttctttacgctatccggttgcttttcagggaaaagaacgggtggtttacgcggagggagagatatttctggaagtggcccgggatgaaaaacatccgtttttcgtgatgcttaacgggatgaaagtggaggtgctgggaacttcctttaacgtgaattcctacgcggatgagaattacacggaggtgacactggtggaaggacacgtggcggcttacgtggacgacaagagctacgatctattaccaagccgacaattacgctgggataaagagagtgaatccgtggatataagaaccgtgaatgttaatgattatatcgcttggaagaaagggcaatatgtatttaaggggcggtctttggaagaggtggctaaagtattggagcgctggtatgatatggagattattttcgagaatgaaaaaagcaagaaaactgtttacacgggggtaattaataaagaggaaaattttgatgcttttgttttgcgattgagagagacgtcatctttatcgtgtagaatggaaagcaatagattatatatcaggtaattttaatcgtaaaggaaaattgtatgaaaaaaattttagtattaggctgtttattgatgtcatttgtcgggcttttcgggcaaaatgaagtctcaaaagagacgaaagattgtacgatacaaggtgtgttagatggtatttataaaggaacgaaggtttatttggttgaagaagaggaaataaatggagcctccaaggttattgatagttgtgatgtcaaggataatcgttatacgtttgttataaagaatgtgactgttccgcgaatgtattttgtgaaaagtggcgatccgaactgtttgagcccgattaccccaatttgggtagagccggggaatgtaaaagttcgggctaattcggagttttttttgaattgtactgttaccggaacggttaataacgagatttttagtgcttataatgcagagatgaagcatttcgtggatagtatgttgcgttcggctaatatagatctgttgttgaatagaaatcagtcggaaaaggaaaaggatagggattttaaagctcgtacgaaacaacatggtagtagagctttgcatttgcaggaagagttagttcgtaggtattatgatcaggcaatagccccgtttatgatcttttgggagatgaaagcgaatgttactctcgatgaattaaaagaattacgtgcagtggtttccccgagcctgaacgaacatccttacacgaagcaattggatgaatatattcgtttagctgaatttaaggtgggaagtgatgtgccggatttcgaattaccggataaggatggaaaaacgtttaaattgagtagtttgagaggtaagtacgtgttgatagatttttgggcgtcttggtgtggtccgtgtatgcgggaaatgcctaacgtggtgaaactgtacaaagagtgtaaagggaagaatttcgagatcgtgggtgtttctttggaccagaaacgtgatgcatggttgaatgcggtggagaagaacaagatgaaatggattcaggtgagtgacttgaagtcttgggcaaccgctcccgtgaaattgtgtaatgtgtcggcagtcccttatacggttctgattgatcctcagggtaaagtgattgccttggagttgagaggtgaggagttaatcagtaaggtgaaggaagttttgaacaaaaaataacaggaatacatgaaa

SEQ ID NO: 563 - DNA, 2455 bp, Butyricimonas faecihominis
ttaatacaccgtgcttaagacatttaaaattgggggagttcacccaccagaaaataaattatcagcacaaggggaaattatcacccttcccctccccgaacaagtaaccatacccttatcacaacatatcggggctcctgccgttcccacggtgaaaaaaggagatcaagtaaaagtaggacaaatcatcggtcaggctgccggctttatatcggcaaacattcatagttccgtgtccggaaccgttatgtcacttgatccggtagtcgacgccagcggttacccccgcccggctgtaaccattaaagtagaaggtgacgaatgggatgaaaacatcctaaaagatcccatcaacaaacaacccggtacattcacaaaagaagagattctggcagctatcagtgcggcaggaatcgtcggtatgggtggtgccaccttcccgacacaggtgaaactatcgccccctcccggaagtactgccgaggtacttatcatcaacggtgtggaatgtgagccttacctcacggcagaccaccgcttgatgctggagcacgggaaagaactgatcatcggtatcgaactcatcatgaaagccctcggcgtgaaacgcacaatcgtgggaatcgaaaacaataaacgagacgccattgaagaactgggtaaactagccagactggcggacggaatcgagatatgcccgttaaaaatacaatacccgcaaggaggtgaaaaacaattgatacaagccaccaccggaaaattcgttccatcgggcggactacccattgccgttggggctgtggtgcagaacgtgggtaccgtgtatgcagtgtacgaggcagtcatgaaacataagcccttgttcgaacgggtagtcacggttaccggaaaatctttaaaagaaccgggtaattacctttgccgcatcggaaccccgatctcacaactgatcgaggctgccgggggattgcccgaagacacgggtaaagtgattggaggaggccccatgatggggaaagccttgaccaacacgaacattcccgtcacgaaaggcacgagtggcatcttacttatgcgtcaagaagaatctacccgtaaagagtatcggaactgcatccgctgttcgaaatgcgttagcgtgtgtcccatgggattggaaccctattatttgatgttacttggagaacacaacaagctggaaatgctggaatcagaaaaggtcatggactgtatcgaatgtggttcatgtagttttacctgtccggcaaaccgtccgttgcttgacgtgatccgtctggggaaagccagaacaggtcaaatgatccggtcgagaaaaaaataaaaaattaatttagaatgaatcgattcagagattgccgattaaatgatttaatgattaacaagcgttgactcgtgggtggaaatcacagaatcggaaaccactaatcactaaataaaaaaatatgagtaatttcaccatatccccctccccccacgttcacggcggggattcgatagaaaaaaatatgtacggcgtgcttatcgcgttagtaccgacgtttatcttttctatcgtatttttcgggctgggagccattctggtaaccctcacctcggtagttgcctgccttgtattcgaatacgttattcaaaaatacctcatgaaacaacgtcccacgatatgggacgggtcagccatcatcacgggagtattgctggcatttaaccttccctcgtctcttcccttgtggatcgtggtcatcggggcattggttgccatcggtatcggtaagatgagtttcggaggattaggaaacaatattttcaacccggctctcgtgggtcgtgttttcctgttgatctcgttcccggtacaaatgaccacttggcctgtaccgaacggattcgccacggcggatgcagtaaccggggctacaccactagcacttgtaaaagaggccgttaagaacggacaagctgtcggagacgcactctcttcagccggattctctaccggtaacttgattctcggtaacattgggggtagtttgggagaagttgccgctatcggacttttattaggattcgcttatatgctgatccgtaagatcatcagttggcacatcccggtggccattttcgccacggttatcgtgttctccgggattctgaacctagctgatccggcacaatttgccggtccagttttccatctctttacaggaggtttgatgttgggagccatctttatggccacggattacgtaacctctcccatgacacataaaggaatgcttatttacggtgtcggtatcgggctgttgaccgtaatcatccgtgtattcggggcttacccggaaggaatgtctttcgccatcctgatcatgaacggattcacaccgctgataaacagatattgtaaaccccgacgattttaaatttactaattgtagat

SEQ ID NO: 564 - DNA, 2455 bp, Butyricimonas faecihominis
aacttatatgtatggctttggggaattttatttatctgttcttcttgtcatgatttctttaaagaatcaagtcaagatgagataaaaccgtctacggtagaagatttacgctccgtgatgtacaaggaggcttatccttatcagtttgcatcagatagttatttgatgttattgacagatgaaatacaatgtaatggttctttgaatgaaatgtatgcaacaaaacatgaaaacggaactcctgtgtttacttttaatccaatgatgtttgacgggggagaatcgtttccggatgatgtaaactcgtggaaagtgtattacgagaagattatgggatgtaacgtgattattgattatattccagaggtgtccggaactgagcaggaaaagaatgcgttacttgggcaagcaattttattacgaggattttattatttgaaattagcaatgatttattgtcaagcttataatgcggaaggtgttgatcccaaaacggcattgggagtacctttgatattaacgatggacttgactgatgattatcctgaacgatcttcattagagaccttgtatggacaggtagaagaggatttgttaacagtaacttctttattagaagaaaattatgagccggataatgtttaccgggtaggaaatatagctgcttacgtattactttctcgtttttatttgtttcgtggaagtgatgaagatttggataaagcgattcagtatgcccaaatggcaatagaacaaggtccgatgttaacacgtttgtctatgttggtaggaacagacaaaagtatttatgatagtgatgctagttcagaagttgtttggtgttatgggggtaaatctttttataattctagttctccctattttttcacccaatcttatcaagagattgttccttgggatgtatcgtctcaattgttgggtgcatatggaacaaatgatttaagggatgatgtttattttagtacagactttgttagaggaacttatggaagtaagatcggttataattcttcatatggtggtgaccacggtattcgtatggctgaagcttatttaaaccgggcagaagcattaacccgtcgtttcatgacaaaaggcgatgaaaatgatcgggtacaggcattgaatgatttgaatacattgagagagactagatatgttgccgggacttatgtagatgaagagattacgaatgcgcaggatttattggatttttgtgtgaatgaacgtagattggagttatgtatggaggaaggcttccgttggtttgatattaaacgttttggtttatctgtgactcatagatatattgatagtgaaggaacagaacgggaatatgtattggaaagtaactctttattgtatgctttacctatcccgtatgatgcaatggaacgaaattataaattaaaacaaaatcccagataaaatatgaaatggagttatttttatatcgaattattgtttttgtcaatattgacagtttcatgttacgatgaaaaggatttggaaccttcaaatatagtttccagttattctgttcctcaagggacacatgattatgatgatgtaattgtagatatttatgatcaatatagtagttgtttattatataagtttacagacaaggatacttattggactccttccggttggatgaatggaagtttgggagaagagggaacaaatggttacattgtaactccggcagacgagaattatgttggtcaacaagtagatttacttcaaaatgcatggttttctttctattcggatgagtttttgaaagaattcttacccgtaaaaattatgctttgttctaatatagactctgtatatgcagaatatgatttttctgaaggttttaaagtgatatacaaaggaaagggagtaaatgcttggtataattacgataatatatgtgtatcttatggtaatgaaactgtgatacagatgacgaaagaggatactttagctttccggaggaaaataaatcagatttttatagagagtatgattgggagaggtaaaacttcacctacgaaagaatttgaggaagttacaaactataaaacagatggtatcaatagtatgagtcctgtggaattatggaaattaggagttccgtgtgctagtctgaagacctatagtgtttcggttgaaacagattggacgagtttcttgatgatgatgataacttttagtgaggaatttttaacaagaactcccgaatatttcaatgaatgggatcattctatggcgaactgggatggtatcttgaatccggcaaaagatgtaaacggtcttttgaaaaagcggtatgatatggtgcgggattattttatcgagaattataacatggatttgcaaaaaataggcaatgaattaaatcgttagtatgaaatatttgttgattatattgttttccctgtac

SEQ ID NO: 565 - DNA, 2453 bp, Butyricimonas faecihominis
atacaatacatgttctttattccatccgtttactcgcccatcattacacgctttaacaatttctctcaagtcattccaaccagattcttcatcaaaaagaaaaacaaacggtgtacttattacatctccatcagaagaaatagcaagggtcttgtccaacaatgatatattattatttattatcgggaaatagttaaaacttgcacctccattcattcttttttctaatccatctctttccacacgaatgaagtaatttcctacaaattctcccgtaaaaactaacttccctcctgtaccgactttagttgcaattttagtatctcctgcatataatttatacactagatttacatccgatccatctaaataaatattctgcaccatacgtggaattgtattcccacctccactcacattaaaaacattcaccccgctagcttgagccatttgagttataactacaacagattggttgaacgttgaaagaaaaataaatcttctagtcactcccgtattattttctttaaccctaaatgttatttcgtaatcatttaaaaaatcaaattccaaccaattataagcaggttgcgataatttctcgtttatcaaatcaatcaacatactacctgtcatagcatttttcaattcatatctaaaagtaacactattcacttctccaaataatgttcttcttgggtttgtctccactttaaaatcgatattaggtatacttaattgagcgaaaatataatttggagataacaccaaaactaaaaacaatattacatttttcatgattcaaattattattaatcaattgaatattgatatcccttcataacgtgacgctcatcatctaacacttttattatcctcccaaatccatcgtactcgtaataaacagtataaccattctcatctgtttcggatgtttttccataacctagtttataggttgctgttgtcattaatgctcttgcaggatgaacacgaacctcatcaacatagcttgacgtactacctatcaaataggatttggaggtggaacttactgttatttgagtcatttcccgctcccatgttactccattattctcacttttccaataagtcagtaaatattgccctgcatccaaatgattcagaggtatattaaaaatccctcgatacactttttcacctgtttttgctttatcacaaataatagcaccatttacatcttcaaagctagtatggtaaatttggtttacagttgcatttgttgctgttgcgataatcactgtattattatatccatagataacagatattggttttccgtgtactcctgcacgagtctgagttggcgcatatgcaggaagactatatgcatcattaattgaaataatttcataatcgggatcacacaccattttaccgttcacgcaagcatagggagaataggttgttttaggttcatttatttttaattgtttcatgttattaagagctacgatagctaaagctccggtatattcatttaagtttcctccaacaacaatatcattcttaaagcgaatcgtttctatgggataattaatcatatgccttctattcatccaagctattccttggttaaaaccatcaccttctgttgtcgttgtcggataattaaacggataggtaattgttgttttaaattttgtatacggagcatattgtgtttcagtaatttcaatcggaacaagattatctttatcatacgtatattgagtattcgtgtttattacatcttgtcctgttgaatactctgttttcaataaaactggttcagaagtccactcgtactcacataaatgccttgtctttttaccagcaaataccgaggtatatgtttgataccctttcacaacttcctttgctgtactaccaaatgaatagctataggtcttttcatggatcagattgttactcttatcatacaatttttcctcgttgattaatccacgatgccaaaaacgggaagtattcacaaataccgctaaattattattttgaaccacagatgaattaggtggaatataatacaccttcgagggtagatccgaatgggattcgttagacgtgtactcatatatacttttggattcattcgttttttttacaataacagtcgcatagcttaccgggctaccgtttatgtcaaagacatcacaaagtaattgggaacttaataaaaagttatatttatcaccacccccttctgcccaaaggcaataattacttccagaaaaaatagttccactagacacagtcaacatatttccccgagaatcacactttttatagtaataccttgtaattaaagaatcatttgaagtcgcttgttgctttatatattttactcttattcctcctatcggggtctgtatattatccataaccgcatcatttaattcatactcgtattc

SEQ ID NO: 566 - DNA, 2453 bp, Butyricimonas faecihominis
acacacaaggctcccccttctaaatttcctactttaaacttttatcttttagtttttatcttttaatatagtaactcaactctccctctgtttatagagggagtaccccgaaggggggagggagttcttgtaaataaagcgttcccactgcaacaaactcctccgtccgcttcgcgtccacctcctctatgaacagaggaggagctgaaataccccccatcttcgggaaacttttcatttctaattcaacttttatcttttagtctttatcttttatcttccgaagggggtagttgtttttccattctaaattctaaactctaaattctaaattacctctatttctccattctccaccaccttccacccctcgatcaccgccccgacctctcccgccgcgggcaactccagcgtcgcgtccagcaccagtggctccaccccgtcaccgaacctcgccaacgcccccgtcaaatccgtcaccacccgctccacgcgtccccccgccatccgaatcgccagcgtcagcacctgtttctcccccgccacgacacccagcaaccgcacccgcgccgcgaaaccctctcctcccgtcacgctcccgaacacgggagccaccgtccccaccgccccggcaggcacctcccccgtcctcacgtccagtaacgacgcgatccccgtcaaccccgcctcgaccgcctccacgcgccccgcgtcaccgggtgacaacttcaacaccagctccagcgtccgtgtccgttgcctcatccgcagcgtcacccgcgtcgtgtcgtccgccacggcatccaccgttcccgtccccgtgaacaggaaacccggcaacggctccagcgtcccgtcagccagcacctccaccaccgcgaccgaatcgcgaaaaccgaccccttccgcccggttaaaagccaccaagtcatgcttccccggatcgtgcaacccgcacgtcgccccctccttctccaccacgacccccgcgccgtccacgccatccacgtacaactcccacgtccccggcaccgccgcgtccgacgagcggcccgaccagtccgccgccaccatcaccgtccccagatccgggtaaggcgtgttatgcaactcgtccttcacgcacccccagcaacaggcccacaacaacccgccgaacgccaaccgcgtccatcttcgtctatctcttttcataccgatcctaaattttaaattccaaattaatcccgaaacgattcacgccccagtaccccttcttcacctcccgtccccgcacccgggtatcgtggatcagcctgtacttctcgtacttcccccgcgtgtaccccgcgccgacctcgacatccaacgaccaccgccgcccgagccaccaccggcgaccacccgcgacaccgccaccgagataatccccctgtcgccccgtctttcccggcttgtaattaaactccccgccttgaccgaacaccccgacgtgccacccgcccggcaagtaataacgcacccccggcgacacgcaccacaaggcatacctccgcccgccgcggctccacgatgtccacgtcccgttcaccaccacgccccagccaccgttcgaccgccactccacccccacgtccggcgtcaacgtcacccaccgggccagattcgcccgcaacgtgaaccctcgcggccccagcctctctcccccgtcccacacctcgccgccgcgggacaaaaactccgcgatcgtccagctctcccgtcccatcgcctcccgcctcggtcgatcgcgacgaatctccacgttctccgcccgacgggcccgccccgtccagctctccttttcccgcgtactatcacgccacgaaaacaacaattcctctcccgccgacacgggcaacggcaaaaccgcgaacacccgtgtcacgagaaacatactcattaataatgtaaatactcttttcatcagcatacatattattatgatcgtgttatatcaaaaaacgatcgtttaaagcggatttaaaaatgaaaaatcgtttcgttttccgcatccgtgtaacttattgttgctcagaatcgaaaatagtttgcatttaaatttgcatatttcgaaaatatagctaaattgcagaatctttaaacgatcgtttattcagattccaatcgtcccgtttcaccccctttccacgcgaaccgacacatccaacatcagaacaccatataccccaatattacaccacccccattctcacgagaaacaatccccaacgcccatcacttaactaaatatcacgtgtcacacacctaataacacccctgcccgggcaggcttctagcaggttaatagcaggctttaagcaggctatataccttctcagccctttgccggcgcgggctgccggaggtcaaaaacaataaaaacgtgtaaaacactaaaaaccaataccataaaattccattatgtttcatac

SEQ ID NO: 567 - DNA, 2452 bp, Butyricimonas faecihominis
gggctcggagatgtgtataagagacagattttagttgtatagtacagattatctttggattagtgttttcatttaagagaaattttattcgccgtctctcgcttcttggagttaaccaaatcagcatagatctgtgtcgttgtgacattcttatgcgttagcatcttcgatactgtgtaaatgtctgtacctaaagagatttggatgacggcatatgaatgacgaaagcagtggaaggttatgtgttttctgattccggcttcagaaatccattgtttcaggggatgatgagtcatggagcgggttaagcctttgaatacttttccggtgccccattcgccacacaactccagtgcttcctgactgatgggaagggtggcctcggtttctgtcttttcggtacagatacgaatatagtagccttgatccggcccgacttcaaagtcacgccagtccagtttcagaatatcactgatacggagaccggtcatacaagcgaacagggaggcttgttttaagacaggaatcttgcagggtgtagccgccagtttcttgacttcatcaagcgtcagatactctttcttgacctctttccattcaatcttttccaaaaagtcgttcaagttctcacgcaacatcttttctttataggctattttcagcaaggctcggaaagttgaataataaccggctgccgaattgcgtgagatataagcattgggatgattgatctgtttgcatttgagcaggtaatccttgaacttctcgcacaactccacggtgacatcaccaaaggtgcatttgccaccgacaaatttctcgaagtggttgtaaacacaatcccatttctcatacttctcccgtgcctttgtccggaagtaggcgaggaaatctaccttttgcttgttcttgtccaggaatccgaattcttcattgataagcgactggacacggatacagcggattgcctcagccttgttcagcatatcctgattgaacattctttgctgctcgttcttgggtttggcatagatgtagatgccgaggaattcccggcgactcatcttcatcgtgtaaggattgcggatggccggataataatccagataaagagatatgcggtcgttacgcaatggcttttgtctcagagttacgttggtgcatgtaagtgtcatagctatattgttttttgattaatacttgtttttgttgcaaataaaataggtgttatgatggtgatatttatcaccggaaaataactttcggctcattctatctttggaggttcaaagaacttgtccagctctgcccggagaatcttggtatatttaccgaccttgatacggggaatattatggtatttcacataatggtagagttgatcccgtgtcagattgaaccgttccatcgcttcggcaatggtgtagtatttgggctcttctggagctatgagacctttggcaatgtccacatgcttcttggagtagtacaccatgatgccgactttctttttgggaatggcattctttgatacaaaagaataaatggctgttagtgtcatgccgaacttctcctgcatgtcttgcgtgctgtaccattccttgatttcaggattgggagctttctttgcaaagtagtcatcaatatgctttttgctccaataggttttaccacggttaaatgtcctggggatattatgctctttagctatatgaaatatccaggaatctttgacaccgaatttctctttaatctcatttgtggtatagaagtctgtgataggaagagtgtctttaggttgtcgtttcttgtatgggtttcttttaagcatctcttctatatcgctctgccgaacaaatgaaagcctactgctcaacttgtaagcaacaagacgtccagtataaatcattttataaacagcttgcagtgaaagccccaacaaagtagcagcctgagcgatcgacaaatattctttgtctttaatatccatcaaaggcttttcactcttaacgatttgaatcctttgctcttcctgctgaatccgttttgctcgtatggcctgcttataagccaaattcgcgcatttgtgtgagcagtatttcgtagttactttttgtgctacgaattcttggccacaccactcacaaatctttttaattctaatgttgctctttgccattttacttgaatttttagggtttatttctccttgatttctccagttttattccaccatcttaaactatattcaaccatagtcaacattctccacgaccttgccaacgataatcctcggattttcgtggtgaggtacacaggaggtacaaaaaatggcgtaaaaaggcttagcaacgattatcaacgatacttgagcaacaaaaaaggcgcccgtaaagagcgccatataatcgattataatcaatttaactatttgataatcaagtatttactt

SEQ ID NO: 568 - DNA, 2451 bp, Butyricimonas faecihominis
cttttcagattcgggggatatttttgtcatgtaaataataaaatagtaacccattaaaaatagaagaatatgaaaaagattgtttttttactcgtatgtttattctcgatgacgatagtaaaagctgataatgacaagccgattgagatgaatcagttaccggcgaaggcgcagacgtttatcacgacttattttaaagatcagaaagtggcattgataacacaggagacaggtttgttttacaagagttatgatgtggtgtttgcaagcggggaaaagttggaattcgataaatcgggagattggacagaggtgaaatgcaaaacgggtgaggttcccgctgccattattccggaggcaatacttaaatatgtgaaggccaattatccggatgcaaaagttttagagatcgagcatgattcggaaggatatgagatcaaattgtcaaatcgcttggagattaaattcaatgataagtttcaggtagtggatattgacgattaaagataaagtgaaagtgtgtgtaggggggctgtttaagtggcccctctattttattatccgatccggatcgggattatcggttgctggtttactttgtcgagaggctctgtttgatattttacccgggcaaaattgatcttacggagatcgatgcaacgaatggcgctatcgtacatggtacgatagtagatcatgcggttcgtcatgtcggttgccgaggtccattgcgtggcgcttggaatatcaacgggagtttggtcgggagcgaattcgattccgatgggtatgtcaaaattattcagtatttggaaacattgaataacggtttgttgtcctgtctcttgacgtggtgcggtcgcttggtagaaagcggcacggacaaatcgggagggaggggtgatatcgcccggtataccaagaaaaccacttccgtttccgaaagaagtaagagccactccgtctagttgttgggagggggccataccgggaatcaagttgacatagttattcaggtttgtcatctgccagtcgaaacttggggagttggtcagtacgcctagtttgttctcgtgaaagatcggtttttcattgatgatttcgagaacgatctggcgtccggtggtgtcggcaaaacgccagtgggcggtagatgccctcggatcgataccgatgacatgaacttttttgatggattcttttacttcgtccacggtcttgcaactgcccaatatccatgaaacgagttgtaggtcggcaatgctggatgctttttctttgggattgtaagcttcatatttcccgtattgcgggaagtaaaacagtccggcggaaagtcccgcctcgttcagtccctctgccacgaattgttcttgctccacggctaacccgatatacccgtagcgagcagtgaaaatcatcccttctgttgtgccgccgggaatgtaggattgttgttcgtaccctcttggtacgacaacatattggctgttgagattgttacctccccattctatggtgcgggccacgatgcaggaaccatccttggctttcaacgtgattccggtgcaggctttgagttctttggggaagaaggtgataaggggtaataccacccataggattattgataatttttgtttcataagagcattgtttttattttaagataacggggaaaacggctttttgtttcattcttcggaagtttcatgaacttgcctattgtttttgatttgtcttctgaaatctttatatttgtaaagaatgtcgtgcaaaataatatgataatgaagacgagtaagataaaaaacggtttggtggtgatggcatttattttgtcggtactgccggtatggggccattcggattggggatttacaaaagatttcggtaatgtccgggttacgtattggtgtggtttcagcaatcacgaggaaagatataaatctcatattattgctcagctggtagagatattatccaaggaactagattgtaagcaaccgatttatctcgatttcaagcattcttatgtggaagatattgttcccgagtataaattatggtacaagcgaggagaatcgggcgatacgttggtgtttcacgtgcatgagaagacgtatgatgcggtgaaggctctccaattaatagagtatgggataaaaaataaagcttctgtcgtgaaaaatcagcgagacacggttatcgagactcgttattggggatcgcaaacgcatacgtctctgagtcgggcggagataaataagattttgagaagaaacgtatctccgttagtaaataaggtgctagccaataaaatatacaggcctaaaaatgaaagtgataaaatagtggaaggatttacgtactattttcagaatagtacgtaaatccttccactattttatcactttcatttttaggcctgtatattttattggctagcac

SEQ ID NO: 569 - DNA, 2442 bp, Butyricimonas faecihominis
acgtgttacttcctataagagaaatacacgattatttgttcatcttttcgattgtagcggtagttgaatatccttcgataaaatcaatagtaatcacttctccccctttggcctttactatatcgtaacctacaatctcttcaggtttatagtctcctccttttactaacacgtccggttgaacgaaatcaattagatcacggggtgtatctgtatcgaaaaatatcactttatcaacgaatgtgagggaagctaataataatgcccgggcattctcgtcgtttacgggtctggaatcaccttttaaccgttttacagaatcatccgtgttcaatccaatcactaatttagttcccagagaggccgctttggctagatattctatatgtcctttatggagaatatcaaaacaaccgtttgtgaaaacgatcttgtcatctttgaatctccacagactcaatatattttcagcctctttcgccgtgtgtgcgatttttttctcgataagtggtaaataatccatgatcatgtcaaataagtttatttgttgcggtgtccgggaaaaccaatgtaggtttgtgtgatttagcctcttcaaaatccattgaagcgtatgagattataatgatcacgtcacccacggcacatttacgtgctgccgggccatttaggcaaataatacccgaatcgcgttctcctttgatgatataggtatcgaatctttcaccattgttaatattcacgatctgaactttttcattttcgatcatgttagctgcctctaacagagcttcatcaatagtgatactgcccacgtactgaaggttagcatcagtaacggtaaccttatgaagtttagattttactacttctataaacatcttcgtgttagtttaaaatacaatattatcaattaatcggattttaccggcataaaccgctatacatccaacttttacattgttttctttccagtcctgaataggttttagttccgtgtcgtccactatttcaaaatattcagttttaagataagggtttttattaatttcgtccactacccatttttttaattcttccacgttcatttgagaagttaaatgagtggcctcttcgagtactttgtgaatatgcggggcatttttcctgtattccggttccaataaagtatttctggaactcatggccagcccgtctgtttcccggatgatagggcatggaacaatttccaaatcataatgtaattgtttcaccatgtttttgatcaccgcaatttgttggaaatccttcatcccgaaatatgcccggtgtggtcgcacgatgtcaaataacttgcttacaatttgtcccacgccgttaaaatgtcccggacgtcttgctccttccatgacgctttccacgtatccgaagttaaatacacgggtatcttcttccgggtacatctcttccacgctgggagcgaacacgtaatcacatccgttcttttccaataaagtgacatctttgtccaaagtacggggataacgtttcagatcttctttatcattaaactgcgtcgggttcacgaacacgctgaccacggcaatatcatttccttttttacatgctttcacgagggatatgtgaccttcatgaagtgcacccatcgttggtactaaacccaccgttttcccttcacttttcaacttctcgataacggtgcttaattccgttttcttagttataatattcatgcttatattcttgaaaatacggggtgcaagtttacaaactattttcgatataatgcaaaatttaaagttgaaaattcaaaatgattatttaaatagtgaatgaatattagcgtgtatagacgagagagcatccagcaactcgttatgggtaacgccttcccgcatgacaataagaactgtatcgtcaccaccgatagttcccagtacctcaaaataattttcattatcaatcagaacggtcacggctttcgcatatccgggaagagttttcatcacggcaatatttcctgaaaaatcaatgcttgaaatagaatccgtcacgatggcggaggctttttcatcggcttgttcattctgaatactgtccgggataatatatatgtaacctttatctttatgaggtattttagctactctcatgaatttaagatcgcgtgataatgtactttgcgttgcctctacgtttagctctttcagtctgaacaataattcttcctgcgagcagatctgttcgttctcaataagctttcgaatggccaacaggcgtttcgttttatttctcataggtgtttatattacgcctcacaaagttagggaaatttgttttatattcaatacggggatataaaataaagagagggtatttgcacttatctggggagtataatggtttgataagttttagaatacggtgtgttgatgtccctat

SEQ ID NO: 570 - DNA, 2429 bp, Butyricimonas faecihominis
tttctattcatttccctaatttcaacttatctattaattcgcatttttttaattcttgttgaactgcttataatatgactcctgctcttatttttacaaccgtccattgctttttttacttaacgcaaaatcccaagagatcaaggttaagctttcgctcttatttcttgaacaactccactataaattttcaattcattttttattttaattttggataaatataattttctatactatatgcatacttattctgttcttcaagtgtatgaaattcaaaatcaatcctagcgacggcatccgttccgtcttcacatatcaagaccttttcccctttgttaaaattttcttcaataccacatacaaaatcctttatttcttcagcaatatataacccatcatatatcccttcatccctactaaacacagagtgacgcgtcagatatttaaacataggataccgacattcatccaatacattacaatagctataatcattaacacataatgaaactaagagttttgtgtaatctaaaccagaatattgttcaataaatttaggaacccctattcccccttgccttgtattaatttcaataacaaataattggttatctttagtgaaatacatttctatattgaattgaccaaattcaagtccagcccccttcacaattttggccacggtatctttaattacattctttttctcacttgacaaatgcaatggagaaatatcactcataggtaccattggtgcaccagaacttctttggtcattaaagataccatcccacaatattttaccatcataaatgaaaatatctccctctatcacggtcaatgaaggcatttcaacaaattcttcgactgtaacttttttattccaagaatctctagcactattttcaaacgattttcttattagagattcatcaaaactatctatcttagttattcctctcgatgcagaatttctacatggctttatcaatactggcaaactcatttcttttattgcttggatagcattttccattgtatctacatccgtctgctttggtgcaaaaactcctattctattttgtaactttctaaataaattcttttctcctatattacgaatactttctaaagtattaccacgcagtcccaactcttcacatacatatgcgacattctgcattacaacttccgaattcgatattatcccatcaacttcttcaacttttgcaatttgtaatacaacctcccgatccatataatcaacctgataatgtttatcaacatattttagaccaggatttgtagttgtccgatcacaaactataacataataaccaagttcctttgatttcgatatcaaaagtagttgatcattagcagcacctaatatcagtatttttttcatatattgtttttgtaataatctttttcctctccccaaagcttcttaaaccgttgtactttcatttcctctttaaaatactctaaataatctttccaagtatatgatggtttataacctaattcattaactgtttttaaataatcaaggacaaactgtgtagaatttgttttttctggagcataaataattttagcattgggattaggattaaaaatttccattattcctttcactctttcttcgatagtgcttcctccactcgcaacattataaattcctccttcatggtctacttccaaagatctttcgattatctgtaaaaaatcataaacatgtactgtttctaacaaacgtttaggatctccccatatctccaaatctttaccttccattgcacgataaattaaatacctatcagaaataagtaccttttctccgtctgtatacgtgtatggattaggatcataactataaattctcgataaccgaaatatgaaacgtttcaaaccatataaagaatgatagtgttcaatcatgtctactgctgcatttttagcaatcacatacattgcatgatcaccttcatacggagctttacgtatagaatttgcaggaatcggagtttttgttccaaataaataactaatatcaaacaacgattgaggaaatatgattctatccacattgatttttcttatatactcaagaatatttaatgttccacaaattattgaagatatatatagttctggatcgtaacctttcatagaagcaggtaacattcctgcgaaattcaagacagcataaacatctttatgaggaagttgattaaaatcttgctttttactaatatcaaccgaataataatgcatgttataatctgcaaaaaagccattatcatttttcctatgcccaacaggaataatttcatatttatctttcagatgaagacaaatatttgctcccaaatttccagtcgcaccaaaaactattatttttttcattttcaattattact

SEQ ID NO: 571 - DNA, 2425 bp, Butyricimonas faecihominis
gatatgaaattcgttgtatcaagtagtagttttttgatgcggttgcaggccgtgagtaaggtgattagtggaaaacccgcacaaccgattctggataatattttgttggtagccaaggatgatacgttgtacgccacggcatctgacaaggaaacgaccatggaggccaagatcgagttggataacttggatactccgggaagtatcacgatcccggcgaagttgttgctggatattctgaaagagttcccggaacaacccttgacgtttgatattaacacggggacgaacgaggtgaagattatctcggataagggagagttttccgtgccgggagagagtgccgaggattatccggtacaatccggaatggacgagagtgtgaacacgattgcaacgaattgcggtatgttgttggaggggatcacccgtacggttttcgccactgcaaatgatgatttgcgtccggtgatgaactgtatcttgatagagatgggaccggagaatttcacgttcgtggcttcggatgctcacaagctggtacgttacaaacgttttgacgccaagacggacggggatcagttcgcgttgatcctgccgaagaaaccgtctttgttgttgaagaatatattaccgaaggatgatagcgagttgcgtttgcaattcaacgagaaaatggcttgtttcactttcggaaattacaagatggtttgtacgctggtggaaggacgtttcccgaactacaattccgtgatcccgcagaataacccgaaaaagatcattatcgagaaaaaggagttgtataattcattaagacgggtttccgtgatggcaaaccaagctagtaacttggtgaagtttgatttgagtaacggaacgatcgtgatttctgctcaagacgtggattatgccatgtcaggacacgaaacgattacttgccaatacgagggagaagagatggccatcgggttcaagtctcctttcgtgcaagagatattatccaaccttaacacggagtctctggtattggagttgtccgatccgagtcgtccgggattgttcttgcctttcgagagcgataatgagaacgaggatttgttgatgttattgatgccgatgatggtttaatcagtaaggcgaaattcgccttactgattaaaccgaatttaaaatttagagtttagaatgaaaaagattccgtgattgccgattcgatgattgggtgattaaaatcacttcatctaaaatcattaaatcacttaatctataggatctaaaatcattaaatctaaaattagtaagttttggaattaaaattaaccaacccgattgtgttctttgatttggagacaacgggtattaatatcgcgaaggacaagatcgtggagatttctgttttgaaagtgatgccgaacgggaaagaggaacaaaaaacgatccgggtgaatccggaaatgcatataccagaacaggcgtctgcgattcacggaatttatgatgatgacgtgaaagattgtccgacgtttaaggagattgccaaggatttggcacgttatatcgaggggtgtgatttggggggatataattcgaatcgttttgatattccattgctggcggaggaatttttgcgtgtggacgtggatttcgatatgcggaaacggaagttcgtggacgtgcagacaattttccacaagatggagcaacgtacgttaagtgcggcgtatcgtttttattgtaacaagaatttggaagatgcccacacggcggctgccgatacgacggccacttacgaggtgctgaaagctcagttggatcgttataatgacacgctggagaacgacatcgctttcctaagcaagttctcaacacagaataacacggcagattttgccggatttattatttacaatgaagaaggggtagaggtatttaatttcgggaagaacaaaggggttcccgtggtgaaagtactgaaagagcaacccggttatttcgcgtggatgttgaacggggagttcccgttatacacgaaaaagatcttgaccgagatccgtttgcggacggcagggttagtgaagtgacccgggaaagagtatttccggataattaattatattcctgtttctcaaagacgagattcgtgcattgcccggtctttgggaaataggaatttgtattctcctatttctcctcccactccggttcggtcttcgttgtatgttgcgctaaggaaacacttgtttcaatatggttatgcttttacttgtggcgacgttacaaggtgttacagtgacggaagtagaaaaatagagaaaaaatatattctaaatgataaagttttcctcgacatgaaccgtcgaggaaaactttatcattttattcccgtatacgagtcagattaagtgatcaatagatggttagggag

SEQ ID NO: 572 - DNA, 2416 bp, Butyricimonas faecihominis
cattaaaactatttaacaagttaatgtacacaaaaagagacaagaaagcaaaaggagctaacagaccctacataataaaaggtgaatatatttcacatctatttccagagataaccaaaaaattaccactaaaagattctgattttggaaaatattttttagaaaaccttccataactacaataaaaaacaaacctccttttccatgttttggttacaaaatttaaatatagctgaaacatggaaacactagaaaaattactaaatgtggcagaagttgaactgtcttacaagtgccacataaaaccagcagacaggataaagatttcagatgagaaagatgtgtattcactagccagaagtctcctagaagataggatagaacaccatgaagagatgtatatggtgttactagatcaagcactaaaggtattgggtgtggctctagtaagtaaaggtgggattagtaacactgtggttgatcttaggatcatatttcaagctgcaatccttgccaatgcaagcaggataattctagttcataatcatccctctggcaatcttaaaccaagcctgcaggatgacaagatcaccaaaagagtttatcaagttgcatccatcttgggaatagaattaactgatcacctgatcatttcagaagagagttattatagctatgcaattgaagacaggatagatgtgatgaatcctagcagggaggattactcttcaccatttctcaatcagaatgagattgttttgccaattcattaaagagtgttaaagcatggcaaataaggcctcaaatccttgatttaagccactttctccttcctttcataggattctctttagcattcataaaaatggcaatataaagcctaattagccttgttttaatcatgaaattttggaagaagtggaggaattgtcccagatgtttttaaatgattattatatataaaaatgaaaacaagtgggacaatgttgcacatagatgtatataatatactaaactaagtgcaacaatcattcaaatcttctccaccctatgatagtacagttctaatttttacctttatatagaattagacctgtacaccatcttaagaaaaagagaagatattttaccctttaatgtgaattaaatttatttttgtcatagagcagcccactaaagcacttgcttataatgctgaatatttctatttttgtaaagttggagtgagtaatcactctagcagacatagtagaacaagaggcattagtttatccttcatttggagatctggtaaatttttgaattgatataaggataaaagcaagtgcttgtcttctcatgtatattattatcaagataatatatgagttaggcatgggctgtttttatttatatcaaggttattaccagaaccaccaaatgaaataaattacagtttccatgccttctttttgtgtaattaccttttggagattgaaggataatacaagaataatgagagaaaatactcttggatgcattgcttatgaatatcttaaacaaaaagcagaaactggagatcaagaagcacaatacaatctagcattgtattacaaacaaagtctttgcactcctatgaatctaacagaatcacttaaatggatgtttcaaagtgctcaaaaagggcatacaaaagctcaatatgaattagggcaatatcatatgaaactaataggacaagaattgatcaaagattcagaaggaaatgtctatgatgcacatgcaatacaagcaagattttggtataaaagtagtgcagaaaaaggacttaaagaggctcaatctaaattaggtttttgttatatacatgccattggtggaagtgaagatttagacaaagcatttttttggtttcaaaagagtgctttacaaaatgaaccttttgctttgtatgctctaggagtattcaaccttttaggatataaagagcacacaaaagatattgaaaaagcaaaagaatatttcctaaaaggtattgaatatggatatggaacacatgaaataattcattttattgaccaacaatatactaacatttaattatgggatttgaagattggatgctagaagatggctatggggatgaaatggaatatatggactaccttgaaaggcaatactacaagagttgtgctaaatatatcccttctacaaataatagacataaagataaacaagtccataatacattttactcaacatgtgtccaaggtactttagagtttatagattcccaacatggagttttgtgtaaaggagatgaatatatatataaaaacatcttaatcaaagttatagaaggattcttttgggacaaaaacaaaataaatcaagaggttccactacatatttttaaaatgttaaacttcaatattcc

SEQ ID NO: 573 - DNA, 2408 bp, Butyricimonas faecihominis
aatgataacaatctatatagatcaaaactacttacaatttgtccatctttatcattagcaagcgtatgtttcacgttattccatgtaacaacttctgctaacggattaataaatttcaacttataagttttttctgccaatttaagttctccattcttaataactaccgtaaattcaagttctttaccaaacagattttcagttacatttccttcttcatcttcaagattttttacccaggtaactttgctaccttcaatatcaatacatcctgctaggtcttcacgattcaatttgaattccattttaggatcactgacaccctcaatattgatgacaaaagcatttttcaaatctacggataaatcaaatttcttgtccttgttaaatactccaggtattgttaatacgtccttatcccaatatcctaatgacaagtctggatcaatactcggagcaacaactgtcacgttacccgtaatcttaaacaagccttcttcaccagttctcttgtcttcaaatgtgattgtaacagaataatttccagcttcagcttttgaagtcgctttcaatttaaatccatcagtaccactaaattcagctttaatcgcatcaactttctctccttctgcattggtgatcacacatttaaagttttctgcgttctctttccaacggtcaaattgttttgttgatagatcgcttagaatatctttaaatttcaattcctctgaaacattttctgtctctgctaaaattttaatcgttaaatttttaaatgcaacatctttatcgtacatttttgtaataaatttaactttaaaatctgcttttctaattccgctaccattcaaatccattgcatagtattcgaaattcaaagtaacaccatcaagttcaaattctacatcagtttgagtttcacttgcaagaatttttccttcttttaatgcctcttcgtccaagtatttcaaatacttttcgtcatctttgtgaatctttatatatcctttaccagtgtacaaatttgcagcagctttagcaaagtccacagggaacagtacttgtcccttctcgtctttaaatgtaaacatcgcaatttcatttacatcatattccacgcccaaatacacagttttagtagcaactgttactttggtcaaatctttagcgattccaataatcggattaattgcataattagataaaacaaagttttggtcatctccaggaagaacaacctttaaagctaaattacccatcttcatatccgtttttccctcataccgaactgttgcagtgtagatatcgttattaacaacagtttctgtcgaacgagaagcaaacggatcattcatatctttaatttcccactctttattaacactgactacttttacaggaacattttttccagtagcatcaacaagggtaaatacgaacttatcagttaatttcacgctactcggattaagaataacggggaattcagctttagcatcactcaaaacaaccccagcctttaatacggttccgtcaatccaaacaatctctttttcaagtggagtacttcgcatgaatgtcaagtctgtggaaagattcgggaaagtgatatctgtaatcgtattttcaaaagctgtaattttatcttgcaattctttaagagcaccattttcgcctaacaatttttccaaatcttgtttcaattgattcacatctgagaccaagctcggtaatttgtcaagattttccttgttcttgttatatgcagcaacgagttcttctagttcagttaattcttcaagcaaccaccctctaatgatttcttctgtcgggattccatcaatatctccttcttgcaaatagttatggtctttcaaatattgagctaatgcatcttcattcaaaagtccgtctaaagcatcttcggttacataaccatccaatgctccttttttcaaataatcatccaatgctccttctttcaaatagctactagcagcatcttccaaatctttaacacgactttctaaggttttcaacgtattaatatcagcttgaataccatcaataacactttgatctgccttttctgcaatagccgtatttaatttagtttctaaagcggaaatctgctcactaattgccttattcaattctgtcgtagcagcagatttgttcgcatcaatttgttcctgcaagtcctttatatcgtcgtcatagtccttacaaccaacgaatgttgaacctgcagcaccgagcaatagcacaaaggccattgtccttacatttaaccattttcttttcatacgtataaaatttaattgatagttaaaaaactcatattgttttctttttctaattttattattcttctttttctaccattcttatttttacacaattcc

SEQ ID NO: 574 - DNA, 2405 bp, Butyricimonas faecihominis
atataataccatgttaaacgatctattttggatagtacctgtatgtgctattatcgctctccttttcgcaaggatcttttttaaagggatgatgaaagagtcggaaggaaccgacacgatgaaacgtattgccgggcatgtacgcaaaggagctatggcttatttgcgtcaacaatatcgggtagtagcccttgtttttcttgttttatgtgcgctttttgcttggatggcttacggtcccggtttacagaatccgtgggtatggtttgcgttcttgacaggaggatttttttccggattagccgggtatatcgggatgaaaacagctacctacgcatctgcaagaacggccaatgctgcacgtaggagtttgaatgacgggttgaaagttgctttccgttcgggggcggtcatgggactggttgttgtcggtttggctctactggatatttctttatggtggttattgttagattatttcgtggaagaggcaacagagacggaaaaggcgatcgtgattacgaccacgatgttgactttcggaatgggagcatccacgcaggcacttttcgccagagtgggtggaggtattttcacgaaggctgcggatgtcggcgcagacttggtaggtaaagtggaagccggaattccggaggatgacccccgtaatccggcaactatcgcggataacgtgggggataatgtaggggacgtggccggaatgggggccgatctttacgagtcttattgtggttcgatactggcaacggcagcgctaggagctgcggcattccgaatggagccggatgcacaatttaacgcgatattggctccgatgttgattgcggcattcggggtgatcttatcattgctcggtatatttctggtaaagacgaaagaaggagcctctcagcaacaattattgcgggcccttgatcggggaattaacgtgagttccttgttaatcgtgggagccagtttcttggtgattcatttgctcggtttgagttattggatatgcggatcagtgatcgtggggttggtaacgggtattattatcgggaaagcgacagaatattacacttctcatgcttataagccaacgcaagatattgccaagagttcggaaacgggtcccgcaaccgtgattatcaagggaattggaaccggaatgatttcaacggccatcccggtacttacgattgtcgcgggtattatactctcgttcctgtttgcggcagaatttagttttgccaatatgtccatgggattgtatggcgtgggtatcgctgcagtgggaatgctttccacgttaggtataaccttggccacggatgcttacggaccgattgccgataatgccgggggtaacgctgaaatgagtcagttgggagaggaagttcgtcatcgtacggatgcgctggatgcactgggtaacacgacggctgccacgggtaaaggatttgctatcggatcagctgcattgaccgggttggcattgattgcctcttatatagaggaaattaagattggtttgttgcggatgggtgaggaagtgttgaagattggagacaacgtggtacggacggctgatgccacgttgacggatttcatgaattactatgatgttactttgatgaatccgaaggtgttgtctggaatcttcatcggttcgatgatggctttcgtgttctgtggtttgaccatgaatgcggtagggcgtgctgcccagaaaatggtgaatgaagtccgtcggcaattccgggaaatcaaaggaattatgactggcgaaggagaaccggattacgctaaatgtgtagagatttccacgaaaggggctcaacatgaaatggttttcccgtctttgctggcgatcattattccggttgttatgggattgatctttggcgtttcgggtgtgatcgggttgttggccggaggattgggtaccgggttcgtgctggctattttcatggcaaattccgggggagcttgggataatgctaaaaagtatatcgaggaaggtaatcttggcggtaaaggttctgataatcataaagcaacggttatcggtgacaccgtgggcgacccgtttaaggatacttccggaccgagtttgaatattctgattaaattgatgagcatggtggctatcgtgatggccggggtgacttgtgcgtttagtcttttataatgttttatattgagggtatgtcaaaagtcatttttttaaactccctcccggctttgccgtactccctctataaacagatggagagttgaaatactcactatcttcgggaagagtaaccagctcctcctctgtttatagaggaggtggcacgaagtgacggaggagttttttaaggataaaatgacttttgacacaccctcagttattttat

SEQ ID NO: 575 - DNA, 2402 bp, Butyricimonas faecihominis
ttcttcatatcattaataataatagttattcttcgtgtatttccccaacctgtaacctgcaacttgcaaacctgtaatgcggcgaagccgctcacataaaagcttgtaacgccagttcgtaggatttcaacccgaaaccagtaattaccccccggcaaacaggagttaggaaagagacatgacggaaagtttcccgctttgccgtgttagaaatatgaacttcgatcacgggacagggtattgccgaaatagcatctgcgatagcaatcgaagtatgtgtgtaagctccagcgttcaaaataatcccgtcataggagaatcccacttcatgaatcttattgataagctctccctccacgttcgactggtaataatcgatctccaccatagtgtagaaatctctcagccccgacaggtactcctcgaaagaggtttccccgtaaatacttttttccctgattcccaaaagattaagattgggaccatttaaaatcaatatcttcatattctccgtttttactgaatacaaaattaacaaaaaaaacgatgataccggacatttcaagccggatttaggcattaaatttcggttacaaaggctaataataaaaattatgagtgttaaacttgacaaaactgttacaactcaaagaaaaaacttatacctttatctggcaaaatctatcagaatactcttgagataggtttaaagtggtgaattagaatttgtattatttattttgtaacacagctaaaaatgatttggaacgaagcgatagatagttttcggacttatttgattttagaaaaatcactatcaaccaactcggtggaagcttatttgaatgacatcagaaagctgggagcctattgtgaacaacggacacctacattgaatccgaaagaagtgtcctatgacgtattaaacgaatatatttccgccttgaaagacaccggggttactccccgtactcaagctagaagtatatccagcatcaaatctttcttcaagtatttgttatacgatggagccatcggactcaacccggcgaactcgcttgatgcaccgaaaatcggacgtacccttcctagcgtcctcagcgtcgaagaaattgaagccatgattaacgctgtggatctgaccaaacaagaaggacaacgtaataaagcaatcctcgaaacattatattcttgcggtttgcgcgtatctgaacttgtcaacttgaagttatcacaaattaacttccgaacaggatatatcaaaatcgagggaaaaggaaacaaggaacggattgttccactaggagcgaaagcaaaagacgagatccgttgctatttgaaaaaagatcgcgacagaatgaaaaaagcgagaggattcgaggatattctctttttaaacaagatgggaaaatctctttcccgcgtgatgatattcaatattatcaaggaaacagcactccgtgccggcttgaataaagtggtatccccccacaccttccgccactcatttgcctctcacttggtaaacggcggcgcggacatccgcacggttcaagacatgctgggacacgaatctattctgacaacggaaatttacacgcacctggataactcatatctccgggatacaatcacaaatttccaccccagagcgaagaaatcccgcaaatgatccttatatttgtatccaatacccgaaaaagtattggatacaaatatttagaaacacatggaaaacaaacaagatatattgaaacagttgtccagcaatgacatggacatcgttagaggggccatcgaacaaatcaaacaagaaggtgatatttccatcgtccccgaattactggacatcctgttacaaagtcaggacacgaacatcattaccaacctcacggccttactctcggacgtgaaagaatccgacttcaaaacagtcttgatggataaattgatcaacgctcccgaaggtagcggaaaagccaatttattacgcatatgctgggaatcagctatcgatttttcggaatatctggatgtattcgttgatatgttattgcatgaagacttcatcacagcactagaagcctccaccgtcattgaaaacctacacggtaacatcccggaagaaaagattcacatagccatacaacgtttaaaatccgaaagtaatgaagacaacgccttcttactggaaggcaccatccctcatttagaagaaatgctcctcaaagaagaagaggatgaagaagaacatcatcacgatcacggacacgattgtagttgccattgtcatgattagttcgcccgcgacaagattatctattgcgtgatttaatgatttcagattaggtgattatagaatcgctgaatcatttaatcggcaatcactaaatctttgaatc

SEQ ID NO: 576 - DNA, 2399 bp, Butyricimonas faecihominis
gcctaggagggtgtgttagatttatccgtgtttttctcttttttcgttcatgtaagaaaaaatcttttttattccaatccaattctcgtgtattatcactaaatttgcccctttaatataagattgataacattaaaaattgggaaaaatgagaattattgtatctgtaattttattggcatttatcactgtcagttgcggtactaacaaacgtgtttacgcaccaccttttgaggaagaggagacagagactgttgtagtgaaagaaaacgtgcaaaccacggcacaaaatcccacaaagaaaactgaaaatacaaaacctgtcgtttctcgggaagagaatgtaactatgactcacggggacgtgttgaaacgttataacgtgattgtcggcagtttttcaaacgtggacaatgctttgaaattacaggcaaaattgaacgggatgggctatcacagtattatcatgaagaatagtgccgggatgagtcgggtaagtattgctggatttgacgaagaggcatccgctcgtgaagaattattaaaagttcgtgaacaatatccggagtttgcagatgcatggctgttgatttccaagcaaaactaaatacgagataaagatgatataaaaggtcggcattagccgaccttttaagtatcaaatcaattcaaatcccacaatatcaggaccgctatcatcttttttcttcgtttcatcatttccagataagacattttcttcggaggcatcccgtggttcttccgttattttttcttctattaatactgttgtggagtctgtaatttcagaatcctctgttacaagtgtaatttcttgcccttcttgtaaagtcggttcggtgtgagagaggatttccggatcttcatttaaagaaataacttcatgtacaactgttggttcctctatctcttccgtaggactctcaatatcaataacggaattttctgagatgattgttgtcatggcagcttggttctctgaaaacgaaacatcttcttgaagaacaccgttttcacatcggaatacttttcccggaaaatgttttattaggtcgtattggtgggtggcgataacgactgttttgccactatcacagatgtctttcagtagttcaactaatcgataggaagtttccgggtcgatgtttccggtaggctcgtcagctaggatgataggaggggcgtttagcaatgctcgggcaagcacgatgcgttgttgttcaccgccggacaattgatgtgggaatttatctcgtttgtcaggaagttcgactttatccaacacttcgtttatcctttccttgattgctttcttgtctctccagcctgtggctttcagcacgaattccaagtttgcgtaaacattccggtctgtcagtaatttaaaatcctggaacacgatcccgcatttgcgtcgtaagtaagcaatttgtgatttcttgatcttgctcagttggtaaccggcaacttctcctttaccgtaaataagggggagttcggcatataatgttttgagcaaagatgttttcccgctcccgactttaccgatcaggtaaacgaattcaccttctttgatctccagagatacatctttgagaatcgtgtttttttgttgccggatgacggcgttttccagttttataattgcttccaccttattaattttagattttagattccaaccgcacaaggccaccgttttgtaatcactgaatcttttcaattttccatttatagttcctttagtcctttgatgtttgcttccggatcgggagagttgaaaacgaaactacctgctacaagggcatcggctccggcatttaccaagcgttttccggtttcgaaattaaccccgccgtcaatctcgataagggtatgagagttagattccatgatcaatttcttcagtttgtcaactttattgatagtctgttcaatgaaagactgtcccccgaatcccggattaacactcattaataaaacaacatcaatatcctcgataacatcttccaacaaagagactggggtatgtgggttcagtgaaaccccggctttcatgccctgtgcttttatttgctggatagtgcggtgcagatgagtacacgtttcgtaatgtacggtcaatatgtctgctccggctttatgaaaagcctccacgtaacgttccggttgcacgatcattaaatgtacatccagtggtttcgtggccattttttttatttgggaaactactggaagtccgtaagatatattagggacgaatacgccatccatgatatccaagtgaaaccaatcggcttggctacggttgaccatttcaatatcttttgatagatgcaggaaatctgcagataatagcgagggagaaacaataacgc

SEQ ID NO: 577 - DNA, 2392 bp, Butyricimonas faecihominis
caatataagcatcattataacgctttataacatcatctaatttcttctgggcaggtttcaatttcttgtagctatcaatgatgtaaagatatttatccttatacttaatctccttcaatccatgattttgcacatacaattcagaattaacatccaatcgttctgaagactcgaaaatcaccacgccatattcttcaagagcattttttcctgaagaaaaatcaatcagagaaagatttataaagcgtttcggattatacctgaactcaactaataaacgattcaaattttcactcacttgattcaaattataatagagatcattatcatttaaaagagcccctatcgttccctctcctctatttattttattcattatcgaatcggttgtagccaaaatataatccaagctcattaatgtctggtgtaaacttgcctgccgtaaagaatcgcttatcgcggatacattacccaaaatagtagaaatctcttcgttattatttctcaaattacccgtgatgctatttacatcctgcaagatagaactgattctcgcagactccccttgtattaaggtatccaaatttcccgaggctccctccaaattacgtaatgttcgatcaatacttccgaaactattacttagattcttttttgtttcctcattaaacaacccttgaacaattaacatcacggaatccaacgatcccagcaaacgctcggccttctgtttcaatggcaacatttgctggctcacctgttccataagtccacgctccacttgggaccgcagggtgtctccacttaccgcagtcacgtgagaatctcccggcactagagcaacaacttttgaacccattaaatcagcactctgaatcatggccaacgtgtttgatggcagctccaaccctttatccaccgagaacttcacgagtacccgatcgaaccgttctcccgtaaattgaatcgaaattacttgtcctacctgatatcctcggtaaataacgccactagacactttcaacccttctacactatcatacacgccgtaaaatgtacttttggattcaaacaaggacgaacctttcaagaaatttattccccaaatcaagataaaaaccgcagccaacgcagtcagggctaatttcgcttctcttcttattttcattttcatgagtattattttatttcttcatttattttttccgttctaactttcttgcctctgccacggtaatttgttttcccttatagacagcaataacaaagcaatcctttacagttttccgaacttcttgttgaaactctaacgctttctcgtaactcgaagttttcttcacgtaataccggtaacggtctgttcccttcagcacctccaccttatctttcagtttcagataccgaagatcttttatttgtgtcttggaagaggcaacttgtatagcataaaacaaatcattcttaccagaagtcgtaatattcttctctacgtctttcttttctaccgtggaagttttctggttttgcttttgcacctgcggagtctgttttgatatcactttttgttcatcctgtccaccggtcaacacgacactgttacgttccacgttattcttataggcctgaaaagccgtaaatatagcccgggcaatattcgtttgtcccgattcagacgttaaaatcttttgatcactcggattcgaaataaaaccggtctcaatcagaacagccggcatccccacgtccatcaacacgataaatcccgcttgccttacttcccgatccggcatacgagttctcgcgattaactccttttgtataggtgcggcaaattccatactattcttcaaatgactatttttcaaaaaattaaacatgatatatgactctgcctttttcggatcaaaaccatcatatttcacagaataatcctcttcgtaatgaatagcctcgttctctttcatggcaacctgaaaactggcctccgacttatgcaaccccagcacgtatgtttccacgcctctcacgcttgatttagaaaacttattcacatgaatggatataaacaattgcgctttggccttattcgcaatccgtccccgttctctcaaatccacggcaacatcttttgttctcgtgtacacgactttcaaatcaggataggcactcttcaccattttccccaatttcagagcgatggccaacgttatatctttttctctcagctttccactgatagctcccggatcttttcctccatgtccggcatcaatacaaatacaattaattttacccaaagcctcttgtgccatcaaagaatttgaaccttctaataaaaagattaccaacaagaaacatatgaacctacactgatttatcatgtatttaaaac

SEQ ID NO: 578 - DNA, 2371 bp, Butyricimonas faecihominis
attataaatcacttaatcataaatcataaatctaaaattattttatgctgccagtagttgagcgttttatcaggtatgctaagattcatacagaatcggatcgggagacgggtttagttccaagtactccgggacaattgcagttcgcttatcttctttgcgaggagatgcagaaaataggaatgcaggatgttgctgtggatgattacgggtatgttatgggttttgtacctgctaatgcagatagagagtgtccttcgatcggttttatcgctcacatggataccagtccggacatgacgggcaaacacgtgaaacctcagattatagagaattacaagggaaatgacgtgttgttgaacaaggaaaagggattcacgctgtcaccagatgatttcccggagctgatgaattatgtcggaacagatttgattgttacggacggtaacacgcttttgggggcggatgataaagcgggaattgccgagatactgacggccatggaatatttgattcaacacccggaaataaaacatggacggattgctgtttgtttcactcctgatgaagaaatcggtgaaggagtagatcatttcgatttgaaaaaattcggggctaaattcgcctatactttggatggtggtgagattggagaattagagtgcgagaatttcaatgctgcattggctcgtttgactttcaaaggacgtaatttccatccgggatatgccaagaataaaatggtcaattcaatcaaagtggctaatgaatttatggctagtctccctaaaaaagaagcacccgaatatacttccggctacgaaggtttcttccatgtttattccattaaggggacagtagaggagacattgttggagatattgatccgtgattttgataaggagcgttttgaatggagaaaagacgtgattgaaaatggagttcgggaatattcaaagaagtatgatttaccggtacttttggaaatgaaggatcagtatgcaaatatgaaagaacgtttggaaccggtgagatatatcgtggaaatagctaaacaggccatggcagaactgggtattaaacctttgattgttcctattcgcggtggtactaatgggtcaagattatcatttatgggattgcccacgccgaacttatccaatggggcacataacgggcatggacgttatgagtatatacccgtgtcttctatggagaaaatcgtgagcgtgattgtgaagatttccgagttatgtgctaaaatataagtgagaaaagcacttcttctgaagcaggttagaaaataacctgctttttttataacaaatctttgttgttttacgtttatcagtcaaaagatattaaaatttaaacctaaataatttaatgagagtatgatgaaaagattctttgctattgccctatttgtattgggtttaggacaattgtatgcgcaaccggtaagagatactgcgtggacaaaagccggttacttcgggttaaaattaacgcaagtaagtttgagtagttggtctgccggaggtgagtctgccttggcatttgatagccagataacatatagtgccgattttaaacgagatcgccagttgtggcaaaatcgtttggaactgggatacggtttgacgaaaaatgatggtaagagtgcccggaaaacaaacgataagatatatttcgcctccacttacgggtatcagatttacaagacactttactggagtgctttattgaacttcaacacgcagtttgcgaaaggatacgattacaatatcgaggattctgactttatttcaaagtttatggctccgggatacttgatgattggtaccggtgttacttggagtccgaataagatattcacggccacttttactccggcctcttggagaggaactattgtagctgacagtcgtttgtcagatgagggggctttcggtgtggataaaggaaaacatctgttatccgagtttggtgcaaacttgaaggcagaggtgaattacgagtttttgcctaacatgaaggtttattctcgtctggaattgtattccaattatctggaagatcctcagaacgtggatgttcgctgggaggttcaattaaatatggccattaataaatggttctcaacgactttatcaactaacctgttatatgacaatgatgtaaagatcgcccaaaaagacggtactgcggggccgcgggtacagtttaaggaagtgttgggagtgggacttcagataaatttctaagagctgattttaatataaaaaaagggttcagaatttctgaaccctttttttatatgttgataaataaggttattttgtcactctttcaagccatttcaccatac

SEQ ID NO: 579 - DNA, 2364 bp, Butyricimonas faecihominis
attcggtattcatccgaattttatcagttagtataaatgtattctttattcacgtccccatttacaggcgacgaattccccctttaccttcaacgtgccgatacaaaaacagcgagcagattcctgttatcacgcgacaaaaggacacaaaaaaaaggacgcccgaagacgtcctttcattatctgaaccgaaaaaaattagttgatcgctacaacagctttcatcatctttttcgtgtttttcatcaacttagccttgttctgaccatccattaaataccaagattcttcttccgggaaatattggaattcagcaacagcatcagtctcttcacttgcaactaccatcttattcaaagatttagttacatggtaaggatgtccggcgtacattacctgaccttcttccacatctccagctttcatggcaaccggattttggccaccccagaactcgatagagttgaagatcaaaacatcacccaagcagcacaactcgtatgccggaaggatacacaatcccaagaatactaactcgttcacgaatttagcgttagacacttgtccgttccagttatgtaacttggaagtcaaagagaaagaaccgtaacaccctgtgaaagccactgatgacaccgcgatcatcacaacagcaatcatttgattaaaactttttttcataacctatgctttaaatttaattagttttacgaaggtaacgctttttgttacgaaactaaagcactttttgttattttttcttgtagaattttttcggagcaatcattaattccgggcgaagcacgttatccagctcctctttcgtcaataatttttcttccaaaaccaagtcataaacacttctgttttccgttaaagctctcttggcgatacgagatgaattttcgtaacctaaagtcgggttcaaagcagtaacgataccgatactgttcatcaccatatctttacaacggtcagcgttagcagtaattccgtcaacacacaaaattctcaaacgatccataaccttggtcaacatctgcatggagttgaacaaagcgtaaacgattaccggctccatcacgttcaattccaactgaccagcctcggcagccatcatcacggtcgtgtcattaccgatcacgcggaaacatacttggttaaccacttccgggataaccggattcactttacccggcatgatagaagatcccggttgcatcggaggcaaattgatctcgttcaaaccgcatctcgggccactggacaataaacgcaagtcgttacatactttagacaactgaacgcagaaacgtttcaattctgaagagtaagtgacacaagctccggtatccggggttgcagcaatcaagttcggagctaaaacaaactcttcaccactgatgatgcgaagttcacgagcgcagatttcagcgtattccggttctgagttgatacccgtaccgatagccgtagcacccatgttttctaccaagaataatttagcggcctcgttcaaacgctcgatattctcttccaacgtgtaagcatatgcctcgaactcttggcccaaagtcatcggaacggcatcctgaagttgggtacgtcccattttcaacacgtgttcgaattcttttgcttttcttctaaaagaatcaaccaacaatttaatttcagcaaccacttctttattggtcaggataattgccaagtggaatgatgtaggataagcgtcattcgttgattgagaaagattcacatgattattcgggtggcaatattggtattcacctttctggtgtcccaacagttccaatgcacgattggcaacaacctcattgatgttcatgttcgtggaagttccggctccaccttgaaccatatctaccgggaactggtcagccaacttaccatcgatgatttcctcgcaagcagcggtgatggcatttgtaatatcagcaggaatcaatcccaattcaaagtttgctttcgcggcagcccattttaccatggccaaagccttcacgtaattcggaaacattccgatcgtgtaattactgataccagcaaagttctcgatagctctcaaagtttgaacgccataatacgcatccattggcacctctttgttgcctagtaaatcatgttctattcttgttttcataactttatagattaattatttccaaatacgtttgaatttctttcaagtttcacccgatcgttaaaaacaataactaaatgtctctcgtccataacaaacgacccgaagaaaattaatccggcaaaggtataaagttaatagtataaagccaaattttaacccataatttacgttccatgcacgaaaacatatactactac

SEQ ID NO: 580 - DNA, 2363 bp, Butyricimonas faecihominis
atataatgatatggagagtttgagagtcttttggggagaactggaagcttttaggtatggggtaatacttctgtttgtgttgacactcacctacatctatcacgttattcgtcggtgtgtgatcgtgtctcgcaaagtaaaaccgatagataaacaagagcatgaaggggtgtcggttatcatcacgtcacacaataatgcggagtgtttgaggcggaatttaccgagttttttgatgcaagcatacgataattttgaggtgattgtggtcgatgaatgttcagaagatgacacgcaggatgtattgaccgagatacagaaagattatccacagttgaggtgtacgcgaatattcccggacacgaaattcagatttactaaaaaattggctataaatataggtgtattggcagccaagcatgatatattgttgttttcagagatcaattgccgtccctcttccatgtattgggtgaagaccatggagtcatattttgatgaaaacacggcggctgtcgtcggttttgcaaattatgatttcaccgagcaaaacgtgagaaattcgcgtatgtttcgtttcttgcgctttataaagatgatggtcatggtgaaaaataaaaaatatatttttggggatggatgtaacatggcttaccgaaaatcgtattatatagaaaaccgtgggttcgcgaagaattcacaatcgtatttaggatacgataatgatatggttagagaattatcaaggtttggggcaataaagatgacaaaagatccggactcgtatgtgataattgataagagtgacaaaaaaggagaaataaacgaagtttcatattattatgctaacaagatgagattggcaatgacggagaggattatgatagatggcgatatgatcgtgcgtttgttcttttatttgacagctatttgtttgattgtcttaggtttttacccaatatacgtgtttcttgtcatgttgacagtatttttaacggatgtaattttgttaaatatttgcgctatttgtctgaaacaaaaaaaattattcctaacttcgtttattattagtacgatcggttttgtttatcgagtgtacgaaaatggatattcattttttaacaagaggaaatggagttaacaaacaacttgtcagagaaagctctttatgattataaggtcgtgaagagggcaataacgggagatgaacaggcttatgccgagttatttaagaggtataaggattcagtatattttatgatactgaagatggtgaataacagaactgatgcggaagatttaatgttcgaggctttcgagaaagctttcacgagtttgaattactattcgcctcagtttgcgtttagtacgtggttattcaaaattgcctctaataacacgattgattttattcggaagaaaaaagccaaaattgtttctttggataaggatgatataaaccctgatgatcgcgggtatatcaatagtgtaccggcagacgtgttgaatccggaagaggagacgatccgtaagcagcgagctgaatttatgcgggaaaaagttgccatgttgaaagggcgttaccgtaaattgatagaattacgttattttgaagagtattcttatgaagaaattgctcaagagctggccattccgttaggaaccgtgaaagctcaattattccgtgcgagagaattgctattgaatattttgcagaatagtgaaatcgctcgggaaaatgaaagagtttagccttctatttttttttatattcttttgcttgggagtgcaagggcagagccaagataaaggcaatgtgtttgtcacgggtgtagtttgtgaccgggacagtatacggccattaccggaagcgatctttcggctggggaaagaggttcgaggggttgataaacaagggcgattttcattgagtgtacaagtgggggataccttgcgtttttcgcatataggctatgttcccatgcaagttgttattccggatagtttaagagaaaatgatttcttactgggggtttttatggtacgagatactgttttactgtcggaagttttaatcttgccgcgttttcttacgggggattacaagtcgaatgcttttttgatgaatgcccagaacaatctaaatcaagctatacatgctgcgtcaaaaccggtgaaagcgatggatcaggaaatgaacaggcgtatgatgatcgaggattttgcccgtaaggtagaaatgaaaggaatggttgatgtgaagttaggtattggaactcagtctatcacagcattacaaggattgatgcgggctcgtcggcaggcggagagagggaaagtcattaatattgaggaaatagacc

SEQ ID NO: 581 - DNA, 2360 bp, Butyricimonas faecihominis
gaggaggagctggtgattcttcccgaagacagggagtattccagctctccctctgtttatagaaggagtaccccgaaggggggagggagtttgtttactgtaaattcgtatataagttccttaattttaaaaacatggaaagatgaaaaaaataattttaacactatacgtatgcttatcatgtatcatgatagcaaatgcacgatggtattcaagtgttgtggacaccttacctaaaagagttattaacggtttggaagttattccggtaagagagacctatgactcgggaaaaattttttggagcttgagagtctctgattttaaagaatgtttttagcgatttgaaagtaaatacccgggaggaattaattataatctaaattccgatgaagtgaacaaggctatttatgattgggatgatcaactttgggaaatatttcctcccgagataaaagctttagaaagatttgatcttactctttttgttgataaaaatggacgtgtttttaccgtggaattttctatgccggacgaagcgtttcaaaaattagaagaattccctaagaacacgttgaaaaacttttaccacaatttaataaaggagaaatgtaaagcttttaaagagatagatttttacgtgttggatccagataatgaaggagatagagagattcttttagcagtatgtggttcgtttggaagtggaaatgagtacacgactatttttttgaataagactggttatgatatgttcggtacatttagcccatggagattgccgaaagacgagtttaagagattactcaaaaagaatgaggcagagataaacagccggaagcaagacgagtaaataattaagcaagagaaacgtatggagttggggaccgcctctaaactcatccaaggggcggtaactgaatacatataaacttatgaaaacaaaattatttagagacatcggttatttggtattcatcctattagcacttagtagttgtgtcaacgagatggatatggtagaaaacaagcaagagttggaaacgggcattagccgatcgtatccagctgacacctggacaaagaatctcatagattacgagggatctacacaagacaagtatgctcttgctaaggtcgagaactgtcttgaaaatctatatcgttttatccccgatatttaatttgtaattgaaaattattattaaaatagtatagacattgttaataatgacaaactcctagcgagccagctaggataaagaaatggcaatgattatgaaatatttatctggaggagcgcctaaagtcgtgttagctttatcaagtaaaattgttaatggttgtagttatgttgacattaacaatgaaacaacctctattcatgtagagtctctatttcctattcgaaaatttaatattgtatctatccaatggactagggaaaatcgacaagttgaaatgatattcttgattgattattggaaacgcattttactttgtgctttacctggagagaaagaaatcagtacgatttctgcggatgaaatggaaacagagattgagagggtggaagaaagattattagaaattgcaaatattctaaaactttgaatcatgataggggagaggggcattgataatttagagcatgataagaccgagtggctctttgaatggttaatgaaacaagattttgataaggatattcgcgagatggaaaaagcccgaaaggagagaacagagaatccgaactgggatagaccggtagttatgtacggagtacgaagaatggggcataagtgcataaagaaacaagagatagcagttgttattgattgtattccatggcaaaagcgagctcggacagctgaaacgcattggtataaaattctttttaagcgattggctacagacatcgagatggaagaagtaaaaggaaatacaaggcgttatagaatattttcctattatgtagaaaaaggctggagcgtggataaaattgtatctagtatagttgaagatgatcgggaaggttatggaattgatccgattgtagttcacgagattattcgttcttttgaaaatttctacaaacgtccgatacgaatatataaacttgatcggagtgttcagctaaaaatagagtgggaagatggctaaagaatgatagtagttatgtttcctattatgaaatctcacataataggaaacatttaatgtaagatttaggaaaaatggcattaatagtagtgtatatgccaaatacagcgatttaaaaaagaattcaatgtggatttacagtgatgtttgaatattttagttgtatcttcgtgataagatataacgaatgaatttat

SEQ ID NO: 582 - DNA, 2354 bp, Butyricimonas faecihominis
acgcataattgtgacacgaaaggtcacgggcgagtgataatttttttgatagagctatcgcaaaatttgggacgtaattatagcaaagaagaggggaaatcccaagatcccctcttctgttttcccgtaagcatattttatttgtgctttttgttttttagaggtgtttcgtgtgtcgtttcttcgactaaataagacggaacatcttttttgttcttgcttttcttcggttttttgtttccggctgcacccatgataaaatctcctataatttaagtgttaaatgtttaagtgattaaatgagtagagatcggttattaaaaaatagctggtcctattcacggactggattaacaaagggtgtgccaaacggcctgtcagtgacacgaagagacgagttggcggtttcggatgtcggattgacagtgtgcgggaaaaagattttttaatgttgttgtttcatttttactttgctatatttgtctcgaatatgtgatcggaatatgatagaattggtggaacatcgggatgcttttgaatgtttgtttcgggaaaattatacccggttgttttatcatgctttcagttttttgaatgatgaggaggaggcgaaggacgtggtgaacgacgtgttcgagcgagtatggatgaattttgagaaattggagttttcttcttcccttgttccgttgctgtacactttagttcgtaatcgttgcgtgagtttgattcgccataaaaaggtgaaggagcgtttttcccgggagattgaagtggagctggaagatcatgaggaagagtccgtggagtacgagatgcagatcgaaaaattgcgtcatttgatcgaattgttgccggctcaaacgaagaacgtgtttaagaaatgttttctagaagggaaaaagtatcaagaggcggcagatgatttaggtatctcgataaatacggtaaaaacacatgtcaataaagcgttgaggattctgcgggaggaatttactgaagattatattttgttatttattctttttagataaaaaaataaaaaaagttcgtttttggcatcacccgtttagagtatgtgagcgtgtattagatgtaaatgggtaaaaagtatggtaacggaaaatgatctggagaaaatagaatttgcactttacgtactgcagcatcctgagatccgggggaagatggaggtacgggagtggttggaatcggggaaacaccgggatttgttggaagagttgaggcgtttccgggaagccggagagctggaggcggctatgaggtctccggacgtggagaaacaatggcaatatttccggggaaagacgaaacctcgtgtgtggagaatgtatttgaaatggtggttaagtgctgccgcagttgttttggcgttagttgtaacggatattttactgaatgaatggtatttcgtggatttgtcattggaaaacactgtcccggttgcacgacaagtacggtcggatgtgaagttgattaccgggactgggaatgagtttttgttgggaaccgggcatatagataccttattaaaaggggaggggctagttgtagattccttgaaagggaggcaatacctgaaagttttacgggttactgaccgggttgcggaacaatacacgttacagattccccggggagcggagtatttggtggttcttgaagacggaagccgggtatggttgaattccgagtctgaatttcgttacccctcagtatttgatcagggtaagcgagaggtttatctgaagggagaagggtattttgaagtagttcatgataaagaacgtccttttatcgtgaggaccgaaaaggtaagtacccgcgtactggggacggaatttaacgtacaatcttacacgggtaaggcggtgaacgtgacgctggtgaaagggagcgtggcagtaagaggtaataatgatcaggcgaatacttcggaagttgtgttgaacccgggagaaaatgcctcatgggagggaggacggttccgggtagaaacagttgatgccttgaagtacgttgcttggaaggatggtttcttttattacgacaatgagcctttggaaaatatcttgaacgagttggggcgttggtttgattttacggtgttttaccagaatccggaagtgaaaagttatcgcttcaagttctgggcaaatcgtaaagatactcccgaggagattatggaacgtctgaatgaaacgggtaaattacacgtccggtttaacggggaaagtgtcgtcgtctcgttgtaatagagaatgttaagtgttttgatataaaaaaaggggtagtctccagctatcccctttcgagtcactattgttcatgaa

SEQ ID NO: 583 - DNA, 2354 bp, Butyricimonas faecihominis
atctaaccctaatcagagacggattatgtgtgcctatccaattatatttttggtatatgcatatgtaaaagaatattgcatacctgcaaaagttgttcaaggtaataaaattgtggtatttgtttgttggagctgtatggttttgatgtatttatgttttaaattttagatgtttgaagtattcttgttttggacatatttattcttattgctgattttttggggggaatattaatatgaattgttatgaaaaaatattgttcgtttcacctaaccttggaagtgggggtggaggagcagagagacagattgtaactattgcatgtttgttgaaaaataggggttatgaggtggagtttttatgttattgtgatggtgatttctattattatattttagagcagcaacatataccggtatattggaaaatttcatcaagctattggaaacgaatgatttctgtgaggaagtttattcgtaaaggtaaatatgatgttgtgatttcttttcttgaaacaccgaattttttaaataattttgctgcgtttgggggtaagaactggaaagtgatcacgggtgaaaggagtgcaaaagaggagcattttttgtcaaggagaggaaaagtgtttgcatggtttcaacgttttgctgattgtgtcgtgtgtaattcggaaaatgctagaaatatgtggcaacagtattacccgaattatacagataaactgttcgttatttataatagtgtaaatttacaaccggtaacatcaacttattatcccaagcgggaagggaaactccatattttgattgctgcaagttaccagtatttgaagaatccgataggtttgataaaagctatatccatgatgagtgcagaagataaagaaaagcttgttgtagattggtatggaagagctgaaataaccaaaggtgatactcgatgttataatgaagctgttcggttggttcaagagcatgggttacagaatgtaattcgtcttaatttttcaacagatcatattcaaaataaaatgaacgaagcagatgtcgtggccctattttcacggttggaaggattaccaaatgctatttgcgagggaatgacaataggtaaacccatagtgatgacaagggtttcggattatgatgtattaatagatgaaacgaatggtcttttgtgtgattggaatgacgtggaatcaattaagaatgttctaatgaaagtcgttcgtcttgattgtgatgagttattgtgtatgggggattgctcaaggcaaaaagcaatagaattattttcacgtgagcgagtaattaactcttggattaatttaatcagtgataaatataaagttcagtagtttctgggagatgttataaaacatcgaggatagacatttcaataaatttgaagaataacgaattcgaagaaggttgtgtcaggattgatcctaggatgataattttaccatggggtgcaattggttacggggggcaatactggtacggaagttatagttaccaaatacataacatctattttatcgtagttggagttctcgctaaaattttgagaatcagaaaataattaaatgatgtgttttttataaaatgtttgatcatgaattattcagattggcaaatatacaaaaagggtataatttcgaagcgagcacctcatattccacttaaagttgaagttgatgagttgttcaagtatttcaaaagtgggtgttatgttcgttggtattcgaatttcgacaaagcggagtctgaaaagttctattttgttataaaggatggggatttttcgatggatacgatctcctcgaaaacaaggaacatggttcgtcgatgtataagtgaatgtgtggtacaaatagttgattatcagcaaattgctcgaggggggggtgaagtgtatctatctgaatgtcggagattcgatagaaaaggatttggaggaaatgtaaagtcatttgaaaattgggagagaggaataagaaatgctgcagagagaggggaggagttttggggagtgttttatcgggatgaggttatagcatatggcgttgcaaagagttatgacgagattgttgatctagttacttggaaatgtaattacgaaaaatataaaaatttctacccagcttatgggttggtttataaaatgaccgagtattatttgcaaaaaaatggagtaaaataccttaatgatggaaatcgttctttttcggaacattcccatgtacaagatttccttgttaacaaatttggatatagaaaagcgttcacggaattgaatgtatgttttaaatggtggttgaaattagtcattatattgattattccatttg

SEQ ID NO: 584 - DNA, 2343 bp, Butyricimonas faecihominis
gtataacaattttttcaaaattgctatacaattaggcagatacttttaatgttaactccttatttccataatcaatgaccgcctcatgcctaacgagaaaatcactccccaacaatccggcaaccctgcgctgcaggtgtttgtcgtatagagaattcacgtactgcaagtcgatgactgccgcgtggatattctcgattgtgtggttatcgatctgtagagccgtgatattcacaagctggacctcattaatttctccgcacacccccccggagttaatctcggaaacatcatccagcggttcatagctaaacggtgtaagtttgtctatgaccgtcacggatgctcccgtgtctataatgaaatctccctcaatgctaccgatttgcagagagacgatgatgtgaaagctgttatcttccagttcaacgatctctatcggaatctttatctccatattttaaagtttgcacaaacttacgcattttcggtgaaatccaaaaaagaggaatgttaatttcagaaagaaatcgaggaataaagctaataattacaattcgttaatcctgaagtatgctgttcttagcacgatatgaataaacagttgaacgtgtaaatggttattagagaagaaaatgctacggataaaattcccagtaaaattatgttggcagtttgggacttaatattgtaaaggcctatgatcacactggctatggattgcaatccggaaatcccggaaatcgctagggcaagataatggccgagacgattgtcgtatattcctatcgagtacaaggtaactaggaaaacaacgagtagggatagcgtgatggataaattgtgtatccagaattttttcatgatgttgtcgatttttgtttttcccctttccggttgatcccggaaagaggaaaaagtggttattggttattataccagtttattttttgagagaaatacatgataatcgctaagataacgaataatccgatgctccccaccagcaaggcgtaggtttccagttggatcaggaagaaaatgtaggcgtaaaggcaagccagaagtcccccgatcgttaatgccgttttctttatttttaaaataccgatcatgtagaatgtgattagtaaagtagtcatgagagcagagatgatataggcaggggtgaatccgatatgttcggacgtggagactaatagcgtgtagaacaagcatagggccagcccgacaagtaaatattgaaccgggtgaatgttctttttctggaatatttccacgaagaaactgacaacgaaagtcaatatgatgattaaaaaggcgtatttagcggagcgtgtggatttctggtattggtctaccgggaacaggagatctaccccgaatgtggattccgtaatggcgtagttcgtgtattggaatcccaaattgtcatccgttatgtccctgtatgcgttcgtggtggcacgatagggactctctttgagaatctgtgaatagttccggttgaattccagtacttcccatttgctcgtgaaaccttctggcgagacctctcgttccgtgggtaaaaaggctccattaaagcttggggtttgacaatttgaacgaatggcgacttttgttgttctgccaagaggggtaaattgaatggactcggagcctttcagtttgagttttatcgtgaaatgaacgatcgaatcgtttgcaaacagttgttgtggcgtgattttcgatgatatgccggaaacgacgaggctgtggggatcaacccccggtgtgaaattcagtttccggttgtcccattccagcgagatttgttcgttgattcctcgcaaatcactgattccaaggttgattgtggcaccttcaatcaatttgtcgttggggaataggttgctttcttttaagtctctggccgagaatgtcccggtaatctccagcgtggaattgtaaacgataatttcatataatcctcgtttgagttcctgcgtgttgacgtctccagtgatattcagttgttcgggaagataattgatatatccctttttgttctctcctttttcgttctggtaaaaataagggatggttaatatcggaccaatgagggtttgagacttgctccatttttgttgaacctcttgtgcggcagcatctgctgtcatttccctttcattgattagccctcgaatcatgctcatggggatgaaagacaagaggataaggaaggctatgagtacgatctttagaactaaagagtcttgtttgttgagactttttcgtgtgccgttctctttttgattttttgctgtttgttcgtccatggtgtattgtatttaatgt

SEQ ID NO: 585 - DNA, 2337 bp, Butyricimonas faecihominis
ttatctaattgagagaatggtgattttgttaagaagttgttaaaaacaaaaaaacatcattttgtgacgcaacctttgatgtacttttacatcttgattaaaaacaacacacacaacactattattaattatatgagaatgaataaaacatctgaggtctatacgacgtaaaaggggagcaagataagaggagagagcgtatcctgtttataaacacgctaatatgagatagataatgatgctcatgtatgtgggcaagttggaggtttatgccgttttaaatggatcaaggaatgaaaaaaatattgattattggaggagatagttttattgccgggcaatttataaggaaatatgtatcaacggattcaatcacgtgttacagtcgcagaccgaccgggtacgagaaagagattgttgtgaaagcatttcgagatatgcccgttgacgcattttcagggtttgatgcggtaataaattttgcagctatcgtacatcgtccggaagtgaaagaccaagaactttatgatgatgtgaattatcggatggcttgtttattagctcaaaaagcaaaacaagctggagtaggccagtttgtgcagatgagtacgatagccgtgtttggtagtgccagtcgaatttctgagacaacaccggaaagaccacagacttattacggaagttctaagcttaaagcagataaagagttaatggcaatgagcgaccgggagtttaaggctgcgattattcgtccgccgatggcatacgggggtggaatggctccgggtaatatgttgcgtttgattcgtttggtaaataagcatattccgctgcctttcggttctgcccggaatagtcgtgattttattaatgtaaaaaatttggttgagtttattcatttagccgtggagaaagaggttgagggtgtgttctatccgacggataaagttccttattctacgcgtaacgtggtcgaggaaatttctcgtcaattgggagtacacacggtaaatttaccttctccttctatattcttgaaactggtagagaaggttcgtcctgatctttatcagaaactttggggagatgtggttattgatcgtcagttagcattaagtgctatcggttacgagcctcgttatactttggaggatgggattcgagagatggttgaatcgtttaagcaacagaaatgataaattggatctatggatttgttctcctgctccttttcgtgctggagaacatttattttaagattgccaagaggtataatattttggatgttcctaatgcaaggagttctcatcatacaattaccctacgaggaggtggggtgattttttatttaggggtacttgtacatggattgatttttgatttttttgcaccttggtttttatgcggattgacgttggtggctttggtgagttttattgatgatatgcacccgctttctgcaaaggttcgtcttttgatccagaccttttctttattattgctgctgttgcagttaggagtccacgaggtctcgtggggatacgtggttgtggctttatttgttgggttagccatactcaatatatataatttcatggatggtattaacggcattaccggaggatatagtctggttgccatgttggcgttatggggaatcaatgcgtttgttttcccgatagcgccggcggggtttattcccgtggtgatactatcattgctggtatttaatttttataatttccgttctcgtgccaaatgtttttccggggatgtaggagccatatcaatggcttttattatactttttttgttgggtggatttataatgcataccggacacgtgtctgcattagtgtttttggcagtttatggggtggatggggtgctgacgattatccatcgtatcttgttgaaagagaacatcggacaaccacaccggaaacatttataccagttgttagctaacgagggaaagtttgctcatttgcctgtttctttgatctacatgggggtacaggctgttgttaatttggggtatttgttggtgttggtatatgttcccgagtatacattgatttattttattatttctatggtggtgctggtggctgtttatttgcctttgagatgtaaattttatgcgttacgagagcaagtatgagatttgaagaaacgttatagactgaaaactataataaaattcgattttcgattttcgattttcaattaatgctgtatctttgtggccgatccggcatataggtttatcaggattgatttgtgaatcaagaaagatgaacctgtgggatggttgcataaaaaacattcaaaaaa

SEQ ID NO: 586 - DNA, 2334 bp, Butyricimonas faecihominis
attttagatttaattattcctatctttgtgcgctcaaaatcatgattagatgaaatatacccttttagcgaaagacaaaaacagtgatgcacgatgtggtgtgttaaccacaaatcatgggaatattgaaactccgatctttatgcctgtgggtacggtgggaaccgtgaaagccgtgcatgcgagagagttgaaggaagatattaaggcccagatcattttgggcaacacgtatcatttgtatttgcgaccgggtacagaggtgttggaagaagcagggggactacataaatttaattcatgggatcgtccgatcctcacggatagtggcggctttcaagttttttctttaggagattgtcggaaaatcacggaagaaggggtcgtcttccgttctcatattgatggttcgaaacatctgtttactcctgaaaatgtcatggatattcagcgcaagataggggctgatattatcatggcatttgatgagtgtcccccggggcagagtgaatacggttacgcgaagaattctttggagctgacccagcgttggttggaacgatgcgtgaaacgatttgattccacggagccattgtacggttatcaccagtcgctttttccgatcgtgcaaggatgtaccttccgggatttgcgggaaaaggcagcggaacacgctgtttctcttgatcgagagggatatgcaatcgggggattggctgttggggaagaggctgaggtcatgtacgagatgattcaagtcgtaaaccggattttgccgcaggataagccccgttacctgatgggtgtcgggaccccggagaatattttggaggcaatctctttaggtgtggatatgtttgattgcgtgatgccgacccgaaacgggagaaatggtatgttgtttaccacggagggcgtgatcaatataaagaacaagaagtgggagaaggatttcagtcgtattgatccggccgggttgagttttgtagatgatgattactcgaaagcgtatttgcgccatttaatcaaggcagatgaaattttagggctacaaatttgctcgatccataatttgtcgttttatttgtggttagtacgtgaagctcgtaaacatatactggaaggagatttcgtgacgtggaaggagagtacgataaagaaagttacaagaagattatagtgctgagaagcaactagcgtaaaatgaagaaattagacttatatattatccggaagttcctaggtacctttttcttttcgatggtactgatcttgagtattgtcgtggtttttgacctttcggagagactggagaaatttatcgaaaacgaggctcccgtgaaggcgatcatatttgattattacctgaatttcgtgccttatttcgcaaacgtgttttcctctttgtttacttttatttctgttattttcttcacgtcaaagatggcttataatagtgagattatcgctattttaagtacgggtatcagtttccggagaatggtccggccatacatgatctcggccggggtgattgcctgtttgtcacttcttttgagtgcttttattattccgaatgccaacaagaagcggatcgagttctccgagcaatatatttggaaaaagtatagtaacaaggaagagaatattcaccggcagattgcaccgggtgtttttatttatatgtcgagttttaacgtgtattccagtcggggtaatgattttacttacgaggtatttcgggaggatacgttggttagtaaattgacggcaaaatctatttcatggaataaggaacttgagaagtggcggattaacaactggacgctacgggaatttgacgggatcaaggagacttacacgacgggacaaactattgatacgctattaaattttagtgcggcggaattctccgaggaccccaagaaaattaaggagcgcttgacattaccggaactggatgaatacatcgcccggcaaaaattgcggggaagtagtaacgtggttgagttccagatcgagaagtacaagatgttttcgggcgctttcgctacattcatattgacgttaattggggtatgtatcgcctctcgtaaaattcgaggaggaatggggttccatttgggattgggattattaatcagtttctcgtacatattatttatgcaattttccacggtttttgcaaccaatgggggcatgagtccgttattagcggtatggataccgaatatgttatttgctgtggtggcgttatttgtataccgggcggcaccgaaataattgaaagttgaaaatgtagaattaaaaatgaataattaagaaggtatgaaa

SEQ ID NO: 587 - DNA, 2327 bp, Butyricimonas faecihominis
ttacaaatatagggtataaatctcaaaagaacacttcgggaggtttgaattaggagagaaaactaaattttaattgtagctttttagtccaaatattcaatcacgctccatgtgccggttcgatcagaaccttctcttttaattcttccttttttgattagttgagataagtggtactttacacttctctcggtactgtttaatagatagatcaattcctttcttgtgatagttggatttgattgtatcgcatcaattatttgttgctgaagcgttctgtttttctggatgttttttcttaatatacagtttggagattagaatctatatattaagaaattttatgaatagtctcccaagttgagggacaaattgaaaggtgaacatgatggctttcaattgaaatattattttttttgtaaaaaggctaacatatttgttttatttattaagtttgtataattagttcgagcgtttcgtatttgtagaggggatatttgttgtgtgtgtaaaaaatgaggattggtaaattgtaatattcgaaggtatggcaactctttttcgtgaagtaaactataagttacaagctcttgtgaacgatatagatatgggaattattggacttcctgacatacaacgtccttttgtatggaaagatattaaagtgagagatctttttgattcgatgtataaagggtatcctgtcggttatttattgttatgggcaaatgcaaatgttgataatagtaaatatataggtgtgggagggaaacagaaaattccaaatttattaatagtggatgggcagcagcgattgacatcaatttttgctgtgatgaaaggaaaagaggtgattcgagaaaattttaataaagaacatattataatttcatttaaacctttagaagaaaaatttgagattcctgatgcagcttcacgacgaagtcccgagtatgtgcaagatatttcaaaattatggcaaccggattttaaagcgcatatttttatcggggattttataaaaaatttagaggcttctcgtgctttaacagaagatgaaaaagctaaaatatgggaaacgattcaaaatgtaaaaaatttagaacattattctttctcggctttggaattgtctgcgaatatttcggaagaagaagtttctgatattttcgtgcggatcaatagccagggtaaaactttgaatcaagctgattttatattgacactgatgtctgttttttgggatgaaggaagaaccgatttagaacgattctgtcatgaaactcgtactcccaacctgcaggcggcttctgcgtttaattatatcataactcctagtccggatcaaatgttgcgagtgtcagttggattatgctttaagagggctgtattgaaatatgtatatagtattcttcggggaaaagatttagaaacaggtacttttagtgaggaacgaagggagaaacaatttgaattactgaaagaagctaataaaaaggttcttgatgttaccaattggcatgaatatttgaaatgtatcaaacaagctggatacataaaaggtgatattataagttcgaaaacgacgattatctatgtttatacgatgttcctaattggtcgggaagagtataagatggatatgtttgaattgcggaaactcatttctcaatggttttttatgtgtatcataactggacgatataccggatctcctgaatcccagatggagtttgacttgtctcaattgcgaggtgtttattctgcagaacaatttaaaaatattcttttaaatattataaacacgaagtttacagatgatttttggaatattactttgccgaacaatttagctacttcatctgcgataagtccttctatgtatgcctactatgcttctttaaatatattgaatgcggatgggttgttttcaaaaatgaaagttcatgatttgttgcaggaaggtttaagatctaaaaagtcacctcttgaaatacatcatttatttccgaaagcatatttgataagtattggcattaccgagcaacagcaaaccaatcagatagcgaattatgcgttagttgaatggagcgataatataaaaatagcagatacagccccggccgagtatctgcctaaatatttaagtcgattaaccccggaacaacaaaagcaacagtattattggcatgctttacccgatggttgggagcgtatgaattacttcgagtttttgagacagcgtaggagtttaatggctcaaacggtgaaagatgcgtttagcactttataagtaatctcgatgctttgttttatggaaaataatg

SEQ ID NO: 588 - DNA, 2324 bp, Butyricimonas faecihominis
ttcatcgccctttcatcgcccattgtcaatagaactacaagtgcgaatgaactcccctcaaagacttacatcagattattacatgattattactatctttttaccaataatgacgtcaaaatagccacgatgcaaaggaacgtgtactttaaagcaatagattgaccatttttctctacctttgttcagaattaaaagtaaacaagatgctagaccataaactcacgatcttttatcacacggcaaagcatttgaacacgacaaaagctgccgagatattacgactttcccagccggccatttccaaaagtatcaaggaactggaaaagggattgaggatcactctttttgatcgtgagaaagggcggttgatgcttacccctgccgggaaatacctcttggaacaaagcgaagaactgattgaacgggaacgcatcatcaccttcaacctgcagcacatgaaaaaagagttctccgggactttacacatcggggccagtaccacgctatcccagtacatattacccgaatacttggcccgtttccgggaaactcatccctatatcgaaataaacctgatcagcggtaacacctaccagatcgagcaggaattactggataaaaacatccaactcgccttcattgaaggtgtaccctcgcaaacggacattcactacatcccttttttaagggatgaaatcgtcctggttacctcggccaaaaatgattccccggaatcgatcacgaaagaacaactgaagacgttaaaattcgtcgttcgggaagaaggctccggaacatataatattatccagcgccagctatccgcagccgggatgtctatcaacgagctaaaccaacagatcgttatcggaagtaccgagggaatcaaacaatacctcaaacactccaattgccatgccttggtctccgtgttttccatccaagacgaactggcctgtggcttgctaaaaatcatcgacatcgacaacctcgaaatctcccgcacgctctatgccattcacaagcagggtaccattgacccctacgccgagctactcctgagattctgcgaatcccggaatcggaaatcgaaacataaaatatagaggtaattgaagtataactaaaagttataccatctgaatatttcttatttccaagattcatatatttgagagaattttgcaccgaacaaataactaaagattatgagcaaaattcaactgaacaaaaatcaaaaggaagtacttttcatcgtagctttatttcttgtaccatttcttgatccgggctttgcccttttactaggtctaattttatcgctgactatcggtcacccgttcttggcaatcaatagccggatcacccatatacttctccaaatatccgttgtaggactaggtttcggtatgaacgtggaacaagccatcgaggccgggaaaacaggaatcctattcaccatattttctattgtcgttaccatcggtttgggattattctttaccagcaaactaagagtcaaccgggacaccggattcctcgtttccgggggaaccgccatctgcgggggaagtgccattgccgccttggctcctgtcattaaagccaaagacaaggacatcaccgtggccatgggaaccattttcatgcttaacgccgtggcactattcatcttcccaataatcggacgctggctggaaatggacgatcatcaattcggatactggtgcgctatcgccatccacgacacgagttccgtggtaggtgcagctaaaacgtacagtaacgaggctttggctatcgccaccacgaccaaactgatccgggcgctttggatcatcccggtttcattgatcgccgccttcttctataataaaggaacaaacaccaaatcaaaaatatccattccttactttattttcttctacattgtcgccatgatcatcgctacctacacgccgcaatggggacatctctacactcaaatcgtgggattcgctaaagtcggaatgttattcacactattcctcatcggtgccggactctctaaagataccatcaaacaagttggtttcaaaccgatcctgttaggcatcatcctttggatttgcatcagcacactatcggctagcgtgatcatgctactatgatggggttataaagttcataaggtttataaggttcataaagtcaaagcgtccttacaggacgctttgtctattgtagctagaacaaccattaaacacggttcgaaggactcccgtcactttacgaaccttatgaaccaaaataattttttttcaaatcttttaaaaataagt

SEQ ID NO: 589 - DNA, 2319 bp, Butyricimonas faecihominis
atccagagataaataaatgattttataaacattaaaactacaagaaatggtttcaattttagacatttacacgggagcaaaggtaaggacaacagaagaaccggttattgaaggtacagtacagaatattgtcgctagtggagtgaacccgtatgattattatgtgacgattcaacccgataagtcaatgatggataacgtcgcggaaagttgtttatatcataccttaaattgtttcccgacagatttgaatttacttccttgttcggatcatgttagccacaaagtggttcgttttaagtttgttacaaacttttttccttgcaatatttctacggatcaaaaatcgtgtttttatgaagaaatattgataatggttgatctgtatggctacacgatcatagagagcgaggaagattgtgtttgtcctgaagcaatcaaggagaatcaaagaatctatttgcattttggagaactctctggatactgccgcccttctgagttagaatgtattgaaagaatgttaagttgtggaactacctttaagatagaacggaaaattgtttctgaagagttgtttgattatacattcgaacaagaattggaaatatacaggaaaagatacgagggatgtatctatgacgtgatgttaaaagcgttcaaaacagataaaagcgaatatgtaatggcttataaagtgatcgatcagatgatcgagaagatccggattaaaacgttgaataatgatatcgtgaaaggttcggaagaagctgtttctgtctttttatatgaagtgtatgacaggttgtgtgacgaaggtttgattgaaactaaaacagaaaatagacatttggaggctcgtcgcgatatatagaaatgaatgggtatgacttgtgttataacaggtctaccccctattttaatgaatgaaacgatttaatagtataaagatgaaaacagttaatagcttatccggggggaaaacatcctcttatatcgcagttcattatccagccgattacgaattatttgctctttgttgcattgaatgtcataacgcaggaagggatattgataagaggatgagacaaatggttaatgataagctgcaaaaatattgtcctcattacccggaatttgttgcaacgagtgaagaccctaaaattttaaaaacgatgtttgacttggaacaaatgatcgggcgagaaataatttggctccgtggtattggttgggaagatatggttcgattaaagaaggctatcccgaaccagttcaaacgtttttgtacaaccatgatgaaaatgcaaccaatatttgaatttctctataaatatacggaattgcctgttagaatgcggatcgggtttaggtatgatgaaatggaacgagcagaacgattgagagaatccttcaagtttgcttataagtgcgagtggcaggaaaattcatgtcgatgggttcagcgatggaaaaaaattgattggcgtgttggagaattcccgttgattgatgataggatcacccattatcacgtgcaaaaattctgggaaagtaaagagattgtttttcccgaagattcgaattgtcaaaattgtttttggaaacgaccagagcaattgaggaaaaattttgagaataatccgcctataatgtggtggtctttgatcttggaagagttgcaggggaatacttttaaaaatatgagtttgcgtaaaattcatgatttacctatccagttagatttttttatggaaccggctccggttgtcaggcgggtttctgtacggattgatttgaataattgaaaatagaattttaaatatgcaattattcctcgtgtttgatgatataattcctattccggaatgttccggattaatgaagatgacaaagtttaaacgtcctatggaccttgcaaatgaaatggttcgggaagtgaaattgtggcaacagaaaaatccagattgtgatgttatggaaattgtgtccccagcttggaaagagtatataaaaagtagattgaaaataataactaactaaagtatggaaacaataaaacgatgtcttaataaactgtgtaagaataaagaacaatgtcgacattggcgaaaaaatattgcctttcttgaaacctttccgaaggaaggtcggacttatgaagtttttaaaatgttcccagcgatgtatccatgttgggtaggatgtaaaagatatgttctagataacaatgcaaataagtaaagtatatgtgaaaaaatttggctgtaaaagtagataattagaaaccagttgggtgaaatatgtatgagttaagtg

SEQ ID NO: 590 - DNA, 2317 bp, Butyricimonas faecihominis
attcaaaagtagcacccagccttctattaaaaaaagagaaatcagtaccgatattaacagatctggttttctcccaacgaagtccccggttaggaagagaatgaacagtactttcataataatgtgaaatagcatctaaagctccgacattcgcaaccatattcggattgtgagcttctgtcacatttccttgcaatccgtaagaaccatgaatattaaggccttgaatccaagtaacattttccatgaaactttcatcagcaatattccagcgaccggatatagaccagattggcaaaaaacgagccgacttatcttgtcccaatttattactagcatctccacgaacatttgcattaaaaatataacgattatcataactataagaaaaagaagcaaaataagacacttcatttttcttgctatcggtaattgtcgggcgagaacttttcaataaatctccataagatgtccacacgccaggattaatatcaacactttttttccctctctctggaagatatcccagtaaagaggaagtgtgtccttcttgatgggtgctacgcatatccaatcctcccatgagactaaaatcatgccgctcatgcaacgtcttctgaaaagaggcagtgacacgcgctgaataaccagtatttcgattatcgctattgtccaatttacctccgaacggcagggcacatctcctagcaaaattcggctctttcacaggatcaataatcggatacccataaaccaggcctcttaattccgacacttgataactatcctcggctgccatgttttcatttgaatgtgaactgatattataagcgagcagagcattcaaactcaaacacgaagccactttgtaactaaagctaaatctggtatttaatgttaataattgacttttttcacctgtggtgttcaattcattgaaaacattatagaccaaattaggcgtactatatggatcattttgataaccagcccccacttcataaaaattataatatccatcttcatcataagggactattgccctagaagttgtataagcatattgaaacaaatcaactcccggacgatgagttgtaccatttgaagcacttagaccgaaactagcattcatcttgtcgcttatcttaatatccaaattagtattaaaattaaagcgttcagcatcttccttcaaggaagaacctcgttcacttgaatatccaaccgaaaaataataattaatggtttcattcgcaccagaaacagataatgtatgattgtgactcaaagcattccgaaacaaatatttaaaccaatccgtattttgctctttcatttttttcacctctttttggaattgtgtataactgattttattgccatataattggaataaaagcccttcatatccaaccgaaccggttattcccgaatcaacgaattgcaatcccttttccaccatctcctcggacacctctacccgatcttttgaattcattacatgcatttgacttgtcatcggacgatgggtaaatcccaaagacatactatagcgaatcgccggttttccgatctttcctttcttcgtagtaatcatgataactccgttagcagctttagaaccataaagtgcagttgccgacgcatccttcaatacatcaatctgttcaatatcctccggattaattccagaaatagcgttaccaattaaatttacttgatccatactattcaattcttccgggctaagaggcacaggatcttctagcacgataccatccaatacccaaagtggttcccgactccccacaatcgttgaggatccccggattcgaatttttggagctgctcctaccgtagaagattgttgtaacacagccattccaggtattttcccttgcaacattttatccaatgtcgtagttataggctccataatatcatccatctttactgtaacaacagaagatgttaatttacgtttatcaatattctcaaatcccgtacgtactatcacttcatccatttgattcatgctcattttcatcgtaatagagaggaaatcacttttaacctcaacttcttgcgtttccattcccacgaaagaaaataataatctcaaatctttaacattggatggtgccggaaaatgaaattctcctttagcattcgtggataatccaatagttgtacctttcactaaaatcgtaaccccaggtaaaggaagttgatcctcatctttcactattccccggatctctctttgttccgagttttccttacgctttggacttattataattgtcctatttttaat

SEQ ID NO: 591 - DNA, 2297 bp, Butyricimonas faecihominis
gtgttttaacaacaccagcgatagtattttgtccggattgcaatgcggaaataacattctgcatcggagcctgcaacattgcgataatgtctgcaagcaactcctctttagacttgatactgatcaacgattcaagctgatcctcgccaacataagcacattcttctacgaatgcggccttgaataccggtttgtctttagtcttacggaattctttaatcagttttgcaggaccgtttccggtgtcgcacaacatgattgcgctatcgcctttcaacgcagaaaaaatttcctcgtagttgttggtagcgttttccaaagcctttttcaacaatgtgttcttcacttgcaccagtttgatgttagcatcaaagcaagcccgacgcaaagcctgagtgtctacagcgtcaagaccggaaatgtcactaacatacaagtgcttgtaagaattcacttgctccgtcaaggtttctattacgacttttttatcttcttttttcatactactgaagtcctttttagattactacattaatcaagtaaagtcttttggtctacttgaataccgggactcatcgtacttgacagatacacgctcttgatataagtacctttagcggcagccggtttcaatttattgatcacgttcaagaattctctagcgttctccataatcttgttcggctcgaatgtaactttaccaatagaagcgtgaataataccgaatttgtcaactttaaagtcgatcttaccagccttcacctcggttactgctttcccgatttccggggttacagtaccactcttcgggtttggcatcaatccacgaggacccaaaattctaccaagagcacctactttacccattacagaaggcatcgtgatgataatatcgatgtcggtccagccgcctttcaatttttcgatatattcatccaatccaacgtaatcggctccggcagccttagcttcttccaccttatcaggcgtacacaaaaccaaaactcttacttgtttaccggttccatgaggtaaagtacatacaccgcgcaccatttgattggctttacgcgggtctacacccagtcgaacgtccatgtcaactgacgcatcaaacttcgtgaaagtgatttccttcacaagctgtgcggcctcgtcgatagaatatacttttccaccttcgatcttcgctaaagctaacttcttattttttgtcagtttactcattacgtttgaagtgttacaagttcattaaaaaggtctgtcaccggttacggttatacccatacttctggcggtaccagctaccatactcattgctttctcaatttcaaaagcgttcaaatctttcatcttgtccgtagcgattgctctcacttgatcccaagtgatagaggccactttcttacgattaggctctgcggaaccggatttgattttagcaacttccaaaagttgaatagcaacaggaggttgttttgtaataaaatcaaacgatttatcaccatacacctgtataattaccgggatgatctttcctgcctgctcttgagttctagcgttaaattgcttacagaagtccatgatattgactcccttagaacctaacgccggtcctactggaggcgaaggattagcagctccggctttaatttgcagcttgataatagcttcaacttgttttgccatgattgtttttaatcaaataattgttattctttttctacctgcatgaaacttaattcaagtggtgttttccgtccgaaaatcttgacaattaccttcaagcgtttcttgtccgtattcacctcctctatcacaccggtaaaaccattaaacggtccgtcagtcactttaactgactcgccaacgaaataagggatacttatttcttctggttgttccgcaagttcatctacagtacccaagatccggtttacctctgcttgacgcatcggtacagggtctcctcctttggtttcccccaggaagccgatcacattcgtgatgtcacgaagtatgtgagggatttctccaacgagtgcggcctcgatcaacacgtaacccggataaagatttcgctcactgctatactttttcccgttacgcacctgatacaccttctctgcaggtactaaaacctgtgaaacgtaatcctgaagccctaaactggcgatttcgttctcgatgtactcctttaccttcttctcttttcctccaatggtccgaagtacataccatctttttttcatttcagccatgttagacctccaagatttttagtaaaacaaattata

SEQ ID NO: 592 - DNA, 2295 bp, Butyricimonas faecihominis
ttgccagaaccttttcttttagtttgcaggcaacgttttaataataaaaaattgaatgatgagaaataaaatacatttttacaaaagatgcttgtacttatgcgttgttatgctggcgacggtatcttgtaacgattggttggacgtggagccgaaatcacaagtgaaggataaggatttgttttcttcagaaaccggttttaaagaggcgctgtccggggtatatagtattatgactcaagagtatttgtacgggaaagagttgacatttggtatgttaggtgtgttagcgcaggagtgggactatcaaccgatggtttatctggatgataaagattatacatacgagagtattcagacggaaatacgaatcgattctttgtggtgtgggttatataatgcaattgcgaatacaaataaattgctgggggaaattgatgcgaaaaaatcgctgtttacaaatcctaattatgaggtaattaaaggggaagctttggcattacgcggtttcttgcatttcgatttattacgattgtttggggctagttatgctgaagatcccgccaagaaagcaatcccgtacgtgacggaatacacgccagaggtgttcccgcagaagactgttgcggagattgtcgatatggtactagtagatttaggaaatgcggctgaatatttgaaaagtgacccgatttatacgggaaaagcaattgccgagacaacagataatggttatctgatgaaccgacaagtgcatttaaattattatgcggtgaaggggttgatggctagggcttatctttacaagaaggactatcagaatgcaatccgttgtgccatggaagtgattgaatccggaaaatttgaatgggtaaagcaatcgaatctgactaatgaaaaaatggccgatctgtctttttcatccgagcatttgtttgccttgaacgtggtgacattagaaagtcgggctgagacttatttttccggtagcaattccgcttttgctttggatgaatcttcgttattggattattacgagggaacgcaggattatcgttacctataccagtttaagagtggtaccgggttgagtgcaggaatgcattatttgaaaaagtatgaccaattgtctggtgacggatcaactgtttggccggttgcttaccggaataaaatgccattgatgcggttgtccgagatgtattatatcttggcggagagtcgttaccatacttcgggtgatgtgttgggtgctttgaacgaggttcgtcgtcatcggggaatcggggatttgggaacaggtgatttggagaattttaattccttgctggtatcggagtttagaaaagaaattattggagagggacaattgttcttttgttataagcgtttgaatatgcctacaatcaagcgtacagatgctgatatgacaggattaggattatataaacttcccttaccgaaggatgaattgcaaaatccgggttgggtaaataacaggtaatgatatgaaaaaacaaattatatggatagggattatcatggcatggatgctgtgtgcctgtaatgaagaggataagttaatgtatgaccagacagagagaagtttgaatctttggtttggttccgagttgtattccggacgtgtggatagcatggtgtataattacgcttaccgtccgctgggaacggaattggattccatacagttttatgtgaaattgatcgggaagtcgttggaggaggattgtccttttgaattggaggttgttggaggggattcttcttctttgattgaggggaagcattatcaattgccggtttacgtgttgaaagcgggagtatcaggaggttatttcccgatttatttcaagaatacgagtgatttaaaaaatagggaatttacaatttctttagcgctaaagacgaatgattggttgactattggtacgaaagagtattccggattgaagttgatcgtgaaggatcgtgaagaaaaaccaatatactgggataatgatccggaacaatttataccgttgaaacaatttttcggtacgtatagtcttacgaaataccagtttatgataaaagtaatcggcaaggcggtcactagggtcatttatagaggtaaacctacggctcccggagaagtgtcgtacgcagaggctttgtacctgcaggaaaaatgccgtgttgcgcttgtggaatataataataatccggataatcccgatcgtcctctttcggatgaatacggaccaatatctttttaattaagttgatattatggat

SEQ ID NO: 593 - DNA, 2292 bp, Butyricimonas faecihominis
acttttatcttttagttttcagtttttatcttatatagtcggtacccataaacccacggagtacatctggaacccggataccttccggagtctggttgttctccagcaaggaggccacgattctcggtaatgctagggcgctaccgttcagcgtgtgtaccatggtcgttttcttgtctcctttatcccggaaacgtagtttcagacggtttgcttgatactcttcaaaattggaaacagagctgacttccagccaacgattctgtgcttttgaatacacttcaaaatcgaaggttagggcagaggtgaaactcaaatcaccaccgcatagacgtacgatacggtaaggtaatcctaacttgattaacagtccttccacgtgttttaccatgccgtcgagagcctcgtaagacatttccggacgggtgatctgcacgatctctactttatcgaactggtgcaggcggttcaatccgcgcacgtcttttccgtatgatccggcttcccggcggaaacaagcggagtaagccgtgtttttgatcggtaactggtctgcatccacgatcatatcccggtaaaggttggttacaggcacttctgccgtggggataagatatagtttgtcctcgttcacgtaatacatctgtccgtctttatcgggcaactgaccggtaccgaagcctgaatcttcattaacgacaagcgggggctgcacttcttgatagcctgctttggtgttttcttccaaaaagaagtagattaaggctctttgtaggcgggctcccaaccctttgtagacggggaatccggcacccgtgatcttcacacctacctcgaaatcgatcaactgatactttttcgccaggtcccagtggggaagttgtccttcttcatgggcaggcacgttatcactgatttttacaatcacgttgtccgcatcactctttccgggaggtacggagtcatgtggtaaattcggtaaacgaacgatgagtgagttcaactcgttctgggtgctattatgttgggcagtcaaggctgcaatctcttctttcagacgggttgtattagcccttgcttgctcggcttcctcttttttcccttctttcatcaaggaaccgatttgcttggagatgctattcatttcggattgcttgttatccgattctttttgtaaattctttctctcgttgtcgagagcgataatcttctcaactaattccttggcatcaaagtttttcacggctaatttccgaatgaccgtgtctttgttttcctgaataaatttaaggtttagcatctctggtaattttaaattttagattttaattttaaatcatcgaaacgggaacacggatgttcttgtttcgaggcgtaaaaataaaaaaaactcctgtactttgtaaggacaggagcttaaatatgttcatttttctacttattcagcgatagcctcaatagaaacgtaagatttgttgtcttgtttttttctgaaaacaacttttccgtcgatcaatgcgaataaggtatgatctctaccgatacccacgtttaatcccgggttatgtactgttcctctttgacgaacgatgatattacctgctttagcaaattgtccgccgaatacctttactcctaatcgtttactttctgattcacgaccgttcttagagctaccgactcctttcttgtgtgccatatcgttttaaattttagaagttacaaaataaattaagcgttgatagcttcgatttgaatctgggtcatacattgacgatgaccgtttttcttacaatatccttttcttctctttttcttgaaaactattactttatcagctttcacgtgagataatacctttgccgtaactttagctccttctacaaccggagttccgattttgatgtcaccttcgttgtctactaaaagcactttgtcgaattcaacttgagcgccttcttctgcagtcagtctgtgaacatagactttacggtctatttcaactttgaattgttgtcctgcgatttctacaattgcgtacattgttctatttcattattaagttaataccgtggggtgggattcttccacttgttgtacccctgaggttaaattttcgctcggcaaaagtagcaattgtttttgaaacaacaaagaatcgttgaataaaactacgttgtctttaatagaaatttttgacattggtattttaagttaggtaataaaagtagatgctgcgatcaatcgtaggtgtttttcatgttagtcaaaatttggcaagttgtcctgtat

SEQ ID NO: 594 - DNA, 2288 bp, Butyricimonas faecihominis
gtattatatgttggagaaactaccagcttcgaacgtcgtttttcccagcatcttcagagtaaagagaaaaaagaacataaattcacaaagatttcatttataaatgatggtgaggaaaacaagtctgtgattcttgactatgaagcaatgctcatcaggcttttcgctgctgatggtcactatacattgacaaacgcaaacaatggccaatctcaatcacataattatcacagaagaaatgtttatagggcaaaaatcccttatctttggagtgaactgccaagccatggatttaagctaaaaacatacgaagaagtggtaaatagcaatttatataagttttctccgtatacacaataaactcaggagcaaaaagaagtaatgaagcaaacattgcgtgcttttattgatacgttaaaagaaggtaaagctggtacgactgtaattaatgggggagcaggtacgggtaaatcattagttggcattaagttgattcatattcttactaatttgaatgattattcttcacatgattcttttagtgattatgatgaagagtgggagttattatgtaatgaacttatagcttttcagaagaatattggaagggagattcgtgtagcttatgttgctccaatgcagtcattcaagcatgatctgcagaaagtatttaagcagactgcgggattgaagacagatatgcttaaaaatacaagtgacatatcagataatatgacaggctattatgatctggttatagttgatgaagcacataggttaaaacataaaaagaatatgggcatgaccatcggtcaattttataaaaattgcaaacggcatggtcttgataaaaatactgctaatcagcttgatcttattatggcaatgtcaaaatatcgtgtgctgttttatgatcagagacagtctgtaaaacctgcagatttaacacatgatgaatttgaagcatctattaataaagaaggtcagacgtcaccacaatggttatatcttaaatctcagttgagatgccagggtggtgatgatttcattgactatatcaacgatatttttgattgcaaaaatcccgaaaaacacaagatagagaattatgatttccgtatctttaatgatatagacgatatggtatgtgctattaaagaacataatagcagaatgggattatgtcgtacagttgcgggatatgcctgggaatggaagacaaaaaagcatatcagtaaaaatattactgcgagacagttattaaatcagaatctatatgatattgatatctgtggtcataaatatgtatggaatactgtagataaaggttgggtattatctaaaaactctattgatgaaataggatgtattcatacagtacaaggctacgatttgaattatgtcggtttgatttttggaccagatatcgattatgattttgtgaataacaagattgtaataaacaaaaagaacttctatgatagttttggaactaatatgcctgaagacgagctagaaccatttataatcaatgcttataagacaatgatggttcgtggaatccagggatgttatgtgtatgcttgtaataaaaatctccagaaatatctgtcaaaatttattgatacttatgtcaaggaatttgatgatagtattggatctccggataagataagaatagttgatgtcgtaaataatagagataagtttacaactcatttgccattttttccaacgcttaaagctgcatgtcatgatttgtcggaaataggattatatgaggaaattatgcaatggatagatgtttctgatgacatgtcacgtccggatgaatctatgtttgtcgtaagagctatgggcaatagcatgatgccgataataaatgatggagactattgtgtgtttacacgctattcaggaggtagtagaaatggagaaatagtactcgtagaaggttataatataaaagattacgatagtgataatatcgcctgcaccatcaagaaatatcatagtgagaaacgtgctaccgaagaaggttgggaacatacttctattgaattgattccacttaaccaagacttcgaacctttcaagttagatcctgatgataaatcatttaaggtcttgggaatattgaaaaaggtgataaggaagtaatataaaatgagctggttgggataactaactagttaattaaatgggtaatttacaacaattttggtaacattactttttataatcactttaacttatcactaaccatttgggcaagtacactaagaaat

SEQ ID NO: 595 - DNA, 2276 bp, Butyricimonas faecihominis
ggttataatattctgtacaaggggaaattaaaaataaaacccaagatgattatcgaaaccatccagttgcagcagatggaattgtacgatgcccggcgggtgattgatacttatgtgcgattgcaggcgctgaatcttttcaagatggtgaatatcgattttaaagaagtggagtcggatggagacgtgaaagctttggactgcgtgatccagttgtcacccgtgaagaggcaatcctataatgtgttcttggagggtacgcataattcaggcaatatgggagtgggaggtaattttacttataaccatcgtaacgtgttccgtgcgggggagaatatttcggccagtatttggggaagtttgcggaaagagcaggtcaatggagagggaaaaatatttaatacctcggaaatcggagctgaattgaaactcgtgaccccgcagttttggatgccgtttttcaagatgaaagatttccggcggaattatgccccgaagacttcgatttctttttcgtatagctatgaatataccccgtattatacccgttcgattgctaatgcccgtttcggttatttatggcggaaggcaaataaaaagtggaggtataattttgatttgattgatttgaattacgtgttgatgaaggatgtagaccagaattttatcgacggtttgaaaaatgaatatatcaaaaatgcctacacggatcatatgatcctttctgccgttttctctgccacttatacggatcagcaggtgaacgtgaaaacggcaaattatagttattttcgggtgaacacggaaacttcggggaattttctttccgttatagatggaattgccgggagtaaaagttccgcgagtggaacgttaaatgaaaagtattacaaaattttcggggtaaggtacgcgcaatttgtgaaagcagatgccgaatatcgttataactggtatatcaaccgggcgaattcactcgtgggacgtcttttcgtggggtgtggttacccgtatggaaacatgaaggtattgccttttgaggaggcgtattacgggggtggggcaaacgacatccgggcttggcaggctaggacattaggtcccggttcttatctggccacggagaaatacccgaatagcgtgggggatttcaaattggcgggaaatattgaataccgtttcaagttgatttggttgttggagggagcgttgttcgtggatgccggaaacgtgtggaatattaacccgaaagaaaatcgtttcggggcaaaactgaattacaatttctttaaccagattgctatcggtacgggggcgggattgaggttgaacgctaatttctttttgttacgttttgatttgggaatcaaggtaaaagatccttccatgcccgagggaaatcgtttcgtgttatttgattcacggggaggattccgacgctcagtattcaacgtggcgatcgggtacccgttctaataatttagaatttagaatgaaaaaggatattggcttgtgggagtggaatctggaggcgtgactttattgcgtcaatcgttgataaatttgtaaattataccgatatttgggggaatgacttttgcattcattttaaactctaaattctaaattttaaattattgaagttgtggttacacaaatagttgtatacttgtctttgttgttacagatcgttgcgatgggattcgctatcagtttgtttaagcggacgaagtttaatgccgcttggattttgatttcaacgggcttttttttgatggcgatttaccgggcgatagaattggttccctcgatgcaccggggagagtcggaagagttgtaccagacgaaagtgtggttgtcatttgttatttcgctggcctttgctatcggggcattttatatacggaaagtatttcagtttttacgtcggctggatggtatacgaagtgagacggaaaaaagggtcctgtcggctgttatccgcacggaagaacaggagcggcagcgttttgctaaggaattgcatgacgggctagggcctttattgagtgttataaaaatgttgctttccggtttcgaggaaaagaacttgcctgaggtaaacgacaagatcaagggaaacctgaaacaggccgtggatgaggccatcacgagcgtgcgggagatttcagctaatatcagtcctcatatattaaataattttggtttaaaggatgccacggagtcatttattcgcaagttgcgtccggctgaaggtattagtattaattttaaaa

SEQ ID NO: 596 - DNA, 2275 bp, Butyricimonas faecihominis
aaaatcattaaatctaaaattagaaatggataaggcacaatataaaaacgtttacgtcttcgttgaacaaagagaaggcgttatccaaaacgtgggtctggaattgttaggtaaagccagagaattagctgatgctttaaatgagaaagtatatgccatgttattgggacatgacctgacgacgcaagctcaggaatgtattgcttacggggctgacaccgtgttacgcgtggatgctccggaattggcaacctacgttaccgaaccttacgcacaggctatttaccagatcatccgagacaacaaaccaagcatcgtgctgatcggggcaactaccatcggtcgtgacctcggcccgcgcttgtctgcccgtgtagaaaccggattgactgcagactgtaccggattggaaatttccgaagaacgggatttgttaatgacccgtccggcattcggtggaaacttgatggcaaccatcatctgcaaagaacaccgtcctcaaatgtcaaccgttcgtccgggcgtaatgcgcatgggacaacgtgacgagaaccggaaaggaactatcgaggatgtaaaaatcaacttcgataaatctaaattccgtgtacgtgttcttgaaacagtcaaacaaaccaagaacttggttgacatcaccgaagctcatgtattgatctccggaggtcgtggagtgggtaatgcagaaggattcgatatgttgcgtgcaatggcaaacaccatcggtgctgaagtatccgcatctcgtgccatggttgatgccggagtattgggacacgaacgtcaggtagggcaaaccggtaaaaccgtacgtcccgacttgtacttcgccatgggtatctccggagcaatccagcacttggccggtatggaagaatccgaatacatcatcgcaatcaacaaagacaaatttgccccgatcttcaacgtggcagatttgggtatcgtgggcgatgttcgcaagatcgttccgcttttaactgaaaagttgaaaagataatacgaaaaaagagactgattattcagtctctttttttacctaacattcattaaaaaatcacgaatccccaaatattgtattccctcataagtatttccatgaaataaatcttgtgagacgacaaacttgggataattatcttctatttttaaaagattgccaaattcccgttggatagttgcttcatcatttaattgtaacgcaacctgtacatacaccttttctccctcccgctcaccaataaaatcaacttcttgtttctccaatactcccacggaaaccttatacccttgataaagcaaatgattataaacaatattttctaatactttcccttgatcttggagtttaaaacctgctataacatttcgaattcccagattttcaaaataatacttatttcctacctcaaaaatacgcttccccacaatatcataccgatcaacacaagaaataataaaagcatttgtaaaatgctcgatataagtcaggatctgattcacccccagcgtgactcgttgcgatttcaaataatcacttatccctttggctgaaaatatacttcccacattatctgcaagaaacagaagtaacctctctaagaaatcagtattccgtaaagcatatcggctaaccacatcccgataaataatcgtggaatatatactctttaaatattcaaaaacaattccatcttctaatttcaaatgcatcaaatagggcaatcctccatacctagtatataatctaaaactttcatccgaattttcaagtccatgaaattgtaaaaactcaggatatgacaaactatatatcgtgaactcaatataccgtccccccaaataagtagctaattctccggacaacatttttgcattactccccgtcacgtatatatcgttattttcatccaaaaccagtgaacgtagagctttctcgaattcacgaacctcctgcacctcatcaataaatatataattcttactctcttttaagcatttactcatcacgtaagcatatagctcctttgcagattttataaaatcaaaagcgatatcttccagatttatataaataatatttgcctcggattcctttttccggatcaattctattagttgaaataaaatataacttttcccaactcgacgttgtccggtcataactttgatcaaagacgttcccataaagggctctattttcctcaaataatgttctctatattttatattctccattttcattataattaaaact

SEQ ID NO: 597 - DNA, 2270 bp, Butyricimonas faecihominis
gatatatatacaaaaaacagccttttcattataaaattatttacaggctcaaaagtaatatattttttggatatatatccagtctcgtttacgctttttcttatcaataaatccgttttattacgtacctttgcggggaatcagaaatattcggatcatgacggtaaaaatgatattagcttgtatcgtggctctcttggcgttagtaaacccggtacagaaagttttaattgttacttcattgcaggagaggttcagtcctaaagaattgcggtatatatccattaaatcatctattacagccgcgttgattctagtcttttttcttttcttgggagaggttactttcagttacgtgttccatgtcgaattgtattcttttcaaatcacttgtggggcggtgttgatgtataacggtctatccggtttgttgaaaggttttttcttgaaagtggacgagcatatcaaattagccgatctgaccacggtgcctattgccatcccgatgatcgcgggcccggcaaccatcacggcagccgttacgtttcccgttcaatacgggcgtgagatcacgattatagccattttgatcgctttggtggtaaatctgttttgtatgttacaagcccggcgaatcgggaatttcttgattaaatacaatttcatgaacccgttgatccggattattgggttgattgttgccacgatcgggttacagatgatatttgacggaatcacgttgtttataaagtcgttgacggtgtagtgtatttgtttcccatttcctttctggccagacgagtggcctcttggataaagtcggttttggcctcggtgtaggcatcccgatcatgttcatagcggagttgaaggttttgtttcagtttgccgtatgattttgccgtttccgggtgggaacgcaggtaatcccggaaatagagttcgttccaatcccccgggaatctcacgtgaagatgaacggcttggcctcggaaaccttgaggggtatatcctttcatgaacatcaggtgaggggccgggttattaggctgcgtgttgcaaatatatcctgcggagatcagggctgcggtgagcgacgggatgtccgcgtcagtggggatttccaatagaatgtctatggttggtttggctattagaccggggacggatgtactgccgatatgattgattctgtacatgttgtttgtcccgagagctgaaatgatggtgtctttttcttgttcataaaactttgcccattctgcacgatgtttgcttaggatgatcggaaatagaacccaaagctcttcgtttgtcatttcttgtaaagggttgttcattgttttaaggtttccagtctataattccgtttgcaggatgtgttttccgccagttttggaaagcggtataatcgtgaatcccgtcttggatgacggcttgatagtactcgattcccatgatttcttcgccgtcgggagtctcgtactttagtttcaatatggtttcccggatttccggtgtcaataccgctaagattcgttcggccacttgctcgaaatagccgtcatagtaggaacctttcaggatgtgaatcatgtcgatttgccacaattcatgatcggaatcctcgtaccacgtgtgccattctatgcagtgttcgtccgtgtcgatcaggtttttgtattcgattcgtttgatcgccgggtttgcggctagtcgtgtgattgcttggaaactgatggccggggttaatcgcggggtatagacgtggaaatctatatcccggtgtttcatcatcaatcccatttttaatgacccgacgagattgatttccgccccgatggatttccaaatattgataatgtcagttgcttggactatctgtttggctcgttctgtattgcgagctgcaagttgtaacatcgtttccataaatccgtgtttgaatatgcaaaaatataaaaacaatctgcgtttctgccaaaaatctactatcttcacgccgaaattgtaaatattcacattttgggaacaattcttaaatttatactggcttagtattagtcttagaaaccacaggctaataattctttcgtttgggtaattctgcccaagccggtttattgtttttatttcttttcattcacggcattgctctttttaaggggataagtctctattgttgtagtttatggtcacttctacgtgtgccgtaagttgtaatgctgtgaatgatcataaaatctttcaaagaatattaggcacagtat

SEQ ID NO: 598 - DNA, 2266 bp, Butyricimonas faecihominis
gtaataatattattatcctgcaatattaatgaaaaaaccgttcatggttcatttatttttataaatttgtcactctgatcggatattatgaaaagatgaaagagcttgaatcaatatataattcttttctggcaggtagccggattacaacagactcccgagaggtaaaaacaggagatatattcattgccttaaagggtgaaaatcacaacggtaacacctttgcagagaaagccgtggcccaaggagcgaaacacgtcgttattgatgaggccgcctacaacacggctccccaatgcgtactcgttcccgacaccctgcaattcctgcaacaactggccaaccaccaccgccggaaattgaacatccccatcttgggaatcaccgggacaaacggcaaaactaccactaaagaattatgtcacgccgttctttccaaaaaatataataccgttgccacgaaaggcaatttaaacaaccatatcggtgtacccctcaccctgttaagcatggacgcctccacggaattcggtatcgtggaaatgggagccaaccatccgggggaaataaaagaactatgtaagattgttgaaccggactacggtatcatcacgaacatcgggtacgcccacttggaagggttcgggagctacgaaaatatcatccaaaccaaaagagccctttacgaatccgtgaaggagaaatcgggaattttattcgtgaacggggaagataaattattgtgccaactatctgaaggccaaaaaagatacacctatggcatcgacggacatttcacgaacggggaaatcgttcagaccaccccttacctcgtgtatgccttgaaaacccatcacggacaactatacatccggacgaaactcatcgggggatataacttcgacaacgccatggcagccaccacggttggaacgtatttcaatatcgatcctttacaaatacaggccgccatcgaggcttacactccctctaaccttcgctcgcaactactgaaaacggaacgcaacacgatcatcctggatgcctacaacgctaacccgagcagtatgcaagtcgccatttccaatttcggggaaatgaaagcagacaacaaattactgattatcggggaaatgcgtgaactgggagccatttctgaagagtcccacaaaaacatcgtggaactcatgaagaaaaacaattttccccgggtattcctcgtggggtcgagttttgaatccatcgcaaataactatacctttacgcgttacttccccgacacggacacgctgatcgagtatctcaaagcgaacgagatccgccacgcttttatcctgataaaaggttcacggggaaataaactggaaaggattacagaatacttataaaacaacagaccatgaacgacagagttgtcatcataccgacctataacgaaaaagagaatatcgaaaacattctccgttatgtttttaaactggaaccaaagtttgatgtgctcgtgatagaggacaactctcccgacggcacggcccagattgtaaaacgtctgcaatccgagttcccacaacttcacatgatcgaacgtaaaggaaagctaggactcggcacggcctatatcaccggattcaaatggtctctggaacacgggtataactacatcttcgagatggacgcggatttctcccataaccccgatgatctggtcaaattgtatcacgcctgcgaaagcggggaaggcgatatggcgatcggttcccgctacgtcacaggtgttaacgtcgtgaactggcccatgggacgggttctcatgtcctattttgcctccaaatacgtaagattcatcacgggtatgaaaatacacgatgccacagccggattcgtttgttacacccggaaagtcttggaatccattgaccttgacaacatccgtttcaaaggctacgccttccagatcgaaatgaaattcacggcgtggaccttgggattcaagctgaaagaagtccccatcattttcacagaccgtaccctcggcacgtccaaaatgagcggtggcatcttcaacgaggccttttggggtgtcatcacgatgaaactccggagcttgggaaaacgtaagaaaattgaaaattgaaaatggagaatggaaaattaagctaccccctctaactcccctgtgcaagggggagccagagggggtagttaaaacgtcagcctcgtgcggccggaatctaaaatctaaaatttaaaatctaaaattactatg

SEQ ID NO: 599 - DNA, 2237 bp, Butyricimonas faecihominis
gtgttgtgttgtacattctggtgtatagcttgcacggaagaacgtcctgggtattatgagggggagaataattgggtacagttttattatttgtggcctgtacagaatccgtatatagctccggttcatctaccttatgaggggtatatgccatccttgaattcaacaaagcttcaggatactgtttatttccggttgcacttgatcgggaggaagtctaatcagccgagaaaagtgatgtttgaatcttatgaaacagagatggagtatagttattacgaaccggctgtggctaacgtaaattatatcgcattcgatgatcctttgatgaagccttatctgacgattccgggagattctgcttatgtgaatattcccgtgatcgtgaaatataacccagcgatttccagtggttattttcagttagattttaaattgattgatacggaagatttggtagtgggtgatacttgtttaatgaaaggaagattaaaattttctcaatggtaataaataatttggagatgaaaaagtttgtattgttgtttggatgtgtgtgcttttgtctgtctgtatttgctcagaccaattttcaagatataagcttctctgaagcgttgaagaaagcaaaagaggaaaacaaaatggtgtttgtggattgttatacttcttggtgcggtccttgcaagtatatggctgataaagtgtttccacaaaaaaagttggggaagtacctgaacgataggttcgtgagcttgaagattaatgcggagcagggcgagggcgtggatatcgccagcaagtatagtgtttctgcttatcccacgtttttgatcttgaagacagacgggacgttaatttaccgaatcgttggaggaacagaaggggccgacgagttcatctccaaggtggaggaaggtttcggggagaaatcagccttcaggatggaagaacgttacctgaagggagatagggaagaggggtatttatttgatttcctgaaatcgttactggcttctgggttagacgagaaggctcgggaagttgctggtgagatcttggctccactgtcagtagagaagagatgtacggagacttactggcctatttatgataaccctcgtttatctttagtaggttcagagaatttacgctttttcctgaaacacgttgatcaatttcgcaggggtgtgggggtagagaaggtgaatgcgaaattgacatttttatatgttagtagattggaagagatgttgcgaggaaggatgcctgcaaccaatgccgacctagaccttgtggaaaaagagttgaagaaacatgatttggagcaggaggacttgagtaattatatagagatgatgagggctattaatgcgaaagatacggataaaatttattctttgtataggaaagtttaccagaacatgagcgagagtaaattgagttacttgtattttcgtccaattcttctttttcaagggcaggggaaatggaccgaaaagcaaaagatcggttttataaattttaccaatgaattgattatgcgaatggaatcacaagtgatgcaattgtcaatgcaaaattttgtggaagcattgcctaagttttgaatgattttatgaggtttatttgaaagagagaagaatagtatgaaaagatttttattcatttttttatcgtgtttgcctttgttcttgggagctcgggaattgcgagataccatagaattgaagcaaggaatggtgtgtcctaaatttgtatttagagatacttccaaacaagaggtttttttgcaacaatttaaaggaaagtatgtggtgattgatgtgtgggcctcatggtgccatccttgtaaacaggaatacccaacattgaagagatgggctgagaagtataaagataaaaatatagaattcgtgagtatttcttgtgatacccaagagcagagatggctcaatgagcttttttgggggaaaatggtcgggaatcagtggtggattgcaaatgataatgcttttatgatagcctttcgggtgacgacaattcctcgtttgattttgttagatcggaaaggaaaggtgatggatttaaaattacctaaaccttctgatccggagtttgaaactattttaaatggattgaatggattatagagcaaaggggctttttagaacccctttactctgtagtgatatatgaacgagattttaaaatgatgtttctcaaataaattaaag

SEQ ID NO: 600 - DNA, 2236 bp, Butyricimonas faecihominis
gtttaaagtttaaaattaaaaatatgaaagttctagttacttacaacattccccgcgaatcattcgccaaactgggaaaagaacacacgatcacaatgccggaaggcgagtatttcaccacggaagaattaatcaaacttgttccggattacgacgttattctaggcatcttcacccgttctatcgataatgcggttatcgaggccgggaaaaagttaaaagtaattagcaatttcggtgtcggttacaacaacatcgacatcaaattcgcccgttccaaaggaatcgctgtttgtaacaccccgaaagccgtatgtttcccgacagcagaaatggccatgggcctcatgctgagtgcagctcgccgaattaccgaatgtgaccgccgcatccgggttgaaaaagaaagcatgtggggcgttatgaaaaatctcggtttcacgctggaagggcgcacattgggaattatcggcatgggaaatattggtaaaacagtggctaaactggcagaagcattccgtatgaatgttatttactacaatcgtcggagtacagtagaaggatacgagaaaatcgatcttgacacgttactgaaaagatcggattttgtttccatccataccccgctgacggacgaaacccgccacatgatcgggaaacgggaaatcgaattgatgaagccgaccgccattctggtaaataccgctcgcggggctgtcattaacgagaaggaattagccatctgtttacaaaataaaacgatcgccggggccgccttggacgtgttcgaggatgaaccccatgttactgaaatgctctacggcttggataacgtgatccttgcccctcacaacgctacaggcactatcgacacgcgcattgccaccgggcaggaagctgttgataacatcctgaacttctttaatggtacacccactaatgttgtaaattaatgaaaacaattatcacaatgctggtactaacagtattaggcagcgcagtcagcgcccaaaacatcaaattacccgccccgaaaaagagcggggggaaagcactcatggactgtttgaacgaacggcaaacagaccgtaatttcgactcgaaacaactatccttacaagacctttccgacctagtgtgggccgcaaacggtattaaccgtccggaaagcggcaaacgaacagttcccaccgccaccaactggcaagaaatggtgctttacgtggccacggcagatggaatctaccgctataacgcagagaaacacgaattggaactcgtgaagaaaggagatttccgtaaagagtgtggtccacaacctttcatgggtgtcgctcccgtgtgttttatctacacggccgaccataacaaggaagggcgaatcacgaacccagaacaccagaaagaatactcttaccaccatgccggctacatggcacaatccgtttatttggtatgtgcagcaaaagatatggcaaccgtggtcatcggttccgtggataaggaagaattagccaaagtcatcggactcccggcaaaacacatcgttatctacacgcaacccgtaggatacaaaaagaaatgattaaaaccgccttcgggcggttttctttttcccctctttaaaaaatattatttatccctccgacaaatacaatctgccaaatgatcgttaatgaaccccgcagcctgcaaatgggcgtagcaaatcgtggttccgaagaatttaaaaccccgctttttcatgtccttactcatggcatcagattcaggagaagatgccggaatttcgcttaaagaccgaacaatattgacaatcggtttcctgttgggaaaaaacgacagcgtgtagtcataaaaactaccgaattccttttgaatatcaataaatagtcttgcattagtaactgttgatttgatttttagacgatttttcacgataccatcaaactgcatcaatcgttcaacatcttcatccgtcattcgtgctacccgctcgacatcaaaatcacaaaaggctttgcggtacccctcccgtttcctaagaatagttatccaactcaatccggcttgagcactctccaacactagaaactcgaataatttcttatcgtcggtcactaattttccccactcttgatcatggtattttacatatagttcgtccgttccgcaccaaccgcagcgtccgtttattaaatcttgcataattataatatttataacacattacaaa

SEQ ID NO: 601 - DNA, 2232 bp, Butyricimonas faecihominis
gaatatgagaagtatatatcatttagggatattttttatcctgttttgtgtgggctgtggggatttgatagatgttgttcccgagaatggtactacatatacaaattatttcaggacgaagcaggatgcggaagctttattgaataatttggagagaaatatgttacagactaaaagtcgggaggaaatcaatcgtttagctgataatcttgaagagagtgacgggtacttgaatctcgatcccggttatatggaagttagttggtcatcatattatagtttgatttacgcggctgatctgattattgataatgctttccgtttcgagatatctgaggaagagattcgtccttatgtgttacaagcctattttgcgaaagccgtggcctattttgcattggcccaaaattggggagaggtacctataacaaaaggaagtacgagttttgtgaaattagccaaaagtcccgtggaggatgtgttgaaggaagcggaaaagtatgctttgttggctatggaacttccgatttggagtgaacttccgtgggaatccaaacaatatgctagtaaaggggctgtctcggctttattggcatatctttatgcttggtgggcatctgtgggagaacgcccggaattgtgggagaaggcggaagaatattgtacgatgattatcgagaataaagtgggattttatgaattagtagagagccccgaggctgtttgtactgaggcgttaatacgagatagtaaggaaagtatatgggagattatgctttgtactgttgataatactttgggatatggtaaagggtcgttcgtgacatttccgttgagattgaatgctgatattattgatgatgaaagcgagtgggctatttataaaactacagtgaacaggttgtatgataaggaagatcgtcgtcgggatgcatatttttggggcatggatgccgattcggttttcttgaaaaatgtggcaggaaaagctgtggctgtcgctgcagatcatcgggagcccggagatgtgattttggaggggcgtgataatcgcaagattaaaaaagcttatttgtacaagtatcgtaatgtgtattatacatatacggatgatcgtccggttccttatttcggaggcttgaatcaggatgtggttaaatatcgcttggcagatattttattgttgcgtgcggagtgtcgggttcgacaaggaaaagagaatgctgcagaggatttgaatacagttcgtgaacgagcgtacgggaatagggagcatgactatacctcggcggaaggagatttgcaattggctattttccgggaacgagagaaagaattgcttctggaagatcattattattatgatgtacgtcggaatggagttgattacgtccgtcgtgagttgcccggagcatatccgaaactttcggatcaggacattaaggatggggctctttatttaatgataaattcattaaattttgaagagaatgatttgatgcgtcagaatgtgtactggaacaggagacagaatgaaataaaataaaagaacctattataaagaatagtgagatgaaaagagcgatatgttttatggtattgtttggtgggttgttatttacagcttgtacgaaagataattttatccacacggggacgagtaaaggtcgttttgaaggtagtttgatggagtatatggaggcacatccttatgattggagttatatggtggaatttgtgcgacattccggagaagatatggtacaactttttgaaggaaaagatccggagcataaagagatcacttttctcggaataacgaatcattctatacgacgttatttgttaacggaagggaagacgatagcagatttggatccggaatggtgtcgtgggattattttgcaacatgttattgatggtaaaatatacaggaaagatgttgtaccgggagaaccttctgaatatgaaaccttaggcacaggaggaacgatttacacaacattggcgggaactcaagtgtggatatatacgatcataccggaagctggtggtgtgactgaaaatacggctcgtcctatttatttgaattttttgaaatctaacgagaagtgtaatgtggcctccggagatatagaaccggataattgtgtcgtacacgcattggagtatgcttttacattgggtcaagaggaataatttgaaaaattgaattttatgaaagtgttattt

SEQ ID NO: 602 - DNA, 2231 bp, Butyricimonas faecihominis
attaaatacctcttgttttcggcagctaaagtagactgaaaaggtttcctaaataatacgattccgttacatcaatgttacatttattaggtttgtttattgtcttttgaagatcgagaagttaacactaccgtaccggcgatgttcgaaaaagttgggttccgaggagaagtccacggtgccgggatgttcgataatggcgattccgtccggggccagtagatcgttattgaaaatggcagccggaatctcgttgattttttctaggttgtaaggagggtctgcgaaaatgatgtcaaaggtcgttccgttcagttttttgcaggcgataaacacgtctgttttgaaaatggtcatattcttgaatcccaattgggcggccgtcttttttataaaggcgtaatggttatagttgagttcgatagaaactattttccctgccccccgggatgcgaattcgtaactgatacttcccgttcctgcaaaaagatccagtacggaggcatcctcaatatctatataattgttgaggacattaaataaattctctttggcaaaatccgttgtcggacgtgctttgaaatttttgtcgggtgtgatgattttacctttgtgtgtaccgcttataatccgcatcgatgaagatttaacaagtgagtaaaatgagaactgttgaattctttatcgtgaagaataccgtttaacaggggttctttagcaaaatagggattcgggagatagagcgagagtaactctttcagtttattatctttgagtgccgggccgcatatcgaaagatgcgctttctcttggttgattccgcactctttgatacaatttaataaaaagtacacgatgtcagtcatcgctttgtagctaaacgtgttaaatagctgaataccggagtctcggataaataacagatcaaaatagttgtcctgaatgtctaggaagatctgctccgtgtctcgtagcgccttgctcatggcacctagtataaaagggtatgccccatttacgatttgaaccacgggaaaatgttcccgtacaaaatcatgaaacgatgaaataaccgtctccacgagataggcttctatcccctctatgtggtgatagaggatcgtgtcatccggtgatacttcttggttgaccgtgtagagggtggcaatattggccttgtcgaaaaaggctcccggaaccagtagtttttccttgaaacacggcatgatatatactttcttgaaacggaggttcaagatcgcatcattcaccacgtaattttttaacctggccacgacggcctctctggaatccgctgcatagggttcgtgtacaaacacgactagcttttccgtttcatcatgcacgcaaaatgaaaatccatccgttgcataacggatggataatatcgatttcttagatgattcgtaagtaaaattggagtcaacaaaataaatgctctgcatgtatttattcgtttacgaaccggaaattactcccagttacccacgttattgtttgcctcttgtacgctacccacttttaatcccgggtatttgtttaatcttattctttcaccgttttcctccaaaatggcatcttcgtattcatcgaacaagtcttcaaaaatgaccatgtttgaaatacgagcctcgaaaacaggtacttcaataccggaatccgtccagatcatgttggtccccatcaagaattcatgtttctttttggtaaaaggaacataccgaagatcatcaatcggatagtttttaccgaataattgttctaaagcggcaactctgatcgtgtcacggataatcaacccttttttcaaagcgtcttgttccgtcataccttcttcaagttgatcatcggtaagttctccgatagaacgtacggttttcaatgaatcgtatttcacgaaattgattaatgaatcgaaactactagtgtatgttccatggatactcttgaaagcatcttgagctgttctgatatctttcaatttttggataaccctatcatatctctgttttttcaatttctgaaattgaataggattctgcacgctttcgtagcacatatatcccagatagagagcggcagctgctaaaagaatttgaataataatttttttcatctttttcgtcagtatatttattatgtattaaacaagttagttctcgttattatttaagctgttttttccctgtcacttatacgaatctgacgct

SEQ ID NO: 603 - DNA, 2225 bp, Butyricimonas faecihominis
gtattattatatctagtttttagaagaaataagatgggtggttgttgtaccaaggagattcatgttattcggggagtattgttggcatggctcgtgttttcacttttttcatacccttcatcgcaattgcagacgaaagcgatatgcatcgtgtttatcgggatgctatcctcgagcctgccggggatgttagagattaacgggaaatggttgggggtgttgaccggaatcgtgggaatattgttttgttgccaagcggtttggccttaccgagaagcggtgagaaactgggaaaactgtttggcgaatagacacgtgttagccgaagaggtagatgttcgttatcgtccattgatgaattcatctttttttctggcaaattgttccttgttgttaaaccagtcgggagaacacgtgaaggccttggaggtagctgatcgtggggtatgcttgtatcattcttacgggtgttgcgtggaaaagggtattgccatggaaaacttgggatgttatgatgctgcggaagtggtatggatacaagcgggtaacttgattcctaatcgtttcaggccgttgtacttgagaatggagatgaagtacaaattgggcgatatgaaacaagtggaggatttaatagatagtttatcatgcaagaaaataaaagtaagatctccggagttacttttcatgttagagagagttaaattaatagaacaggaaatcaaaacaaaatgccaatgaaaaaaaattacgtgttattgttatttttgtttattctgggaagtggcgtgttcgtcagttgctatgatgacgaaccggacgtgttggctgatcccgataatgcaggaataaacgagatgttaaatgggataacggatccggaagttcgaaaggctatagcttggtttgaagagcatggacaggatgcttcgcttgcccgggcgggagaaactcatccgttattcagcatgatggttcccgcgtggtcttacgctttcgtgaggagttccaatgacgagtatcgcacggtagaggttccgatatgggcttattcccgtactcttttcaccttgcccgaaaacgcgatagcttatgatgaaacgggaaactcgatgtacattcaatctttaacccgtcttgtcatcttgacgaacaagaagaaagggacaacccaaggttttttcatgacgttgatcccttctaaagagtacatggatgcaaagaatttcaacgtgtaccgttcaacgtatctttcccgggagaaagattttgacggttatgtttatttccacgagctggacggttcgttcgctaacggttggcgttactctaacgggaaaatcacgcacacggtaaagatgctagaaaattctggtttagcccggggaggacattacgagaatgttacttattgttacccggtataccggagggtatgcacgggttactggcagacaaccgaaagcggtggtcgagaatacgtggaagtgaattgttacgaggaatatgtcagggatgagtgtcacacggaatcagtttgggttcaggatccggatcctcagccaggaacgggggaaggatcaggaggagattataagccagataaaaatgaatgtccttatgggacaccaaattgcccgggagggagtaattgcacgtgttgttcgatttgtaaaggtccttgtaaatgtgaaatttgtcattctgatccatgtaaatgtattcgagatataaaattaacaataaaaagttctactacgggggaacaagctgttgtgagaattgggacaacaacagaacgatattatgtcccattgtataatgtcgtcctagaagctatagattcaacggggaagtctataattgagaattacgaggctataagatttggagtaaaatatgaaaatggagtagcggtggttaagggattacaggatgaagcaacttatacgattcgtgaatttattttagcatattgtggtgaaagtccttctggtgatgcttggagaatatatggagggcatttgttgcatgctgggccaagagatccaaaattagggtgtaacatgtatgggtgtatagggatttgtaatggtagaatgggagaattaaatcggaaattattactatattcgaatgcaaaaacggaagaagctttggtccaatcggagaaatttattgtgtatgttgaggctgcatcgaaaccttctttagtaccaataaat

SEQ ID NO: 604 - DNA, 2219 bp, Butyricimonas faecihominis
cattgtatattttaccaatcattaccatcttgctaaccaatacggattctgacgcattaaagtattgcgctgcatttccgtatccattatcggaacatataacgctccatcttttacatcctgttcggaaagtttctcgaacgtttcagaaatcattcccgggaaattatagtatccgttccgaacaatatcataataccgttctccgtcaaaaaacatttctcgttccctctccctgaatattgccatctgtaaaccttcagtatcagtatccgcaggatagatttttgcatgagcccgatttctaacataattcaaatcatcttctgcccccggcaaatttgcacgacaacgtgcttctgctcgtagtaaataaatttcagccaaacgccaaaatattttattaccatctacatttatcatttccgccggaacccaagccgcatccaataatggtttacgccagaaatatggataagcgtagccgcccgtaacctcattatcagtttctgccatttcatcaaatttccaaaaataagccgcacgtcttaaatcctcatcaccccaaatcttctttacccgatcattttttatgagataaagattttcatattgattattagacaaagagccaaaggggtttaacggatatcccccatagccatagtttgcccctatatggaaatttatacccggggaaaaacgtccggtcgtgaaaccaaagtcaatactactattcaacaattcaaaaacagattcagaactcatgcgatccatgacaacagaacagacttcttcaggcgtatcaaccattttataaatccccactttattttcaataattaaagtacagtacttttcagtctccttgtaagcatccggatcattgaataaaccacctttccatgcgtaaatgttagctaaaagtgccgcagccgctcccttatgtgcataatattttttcaatttctgtccgttataatcaactgcctcatcatagttttttaacagatcaaaagctttcaaagcattagacaacgctgtatctaatacaactttcgcatcactacgccctaacggatctatacttttggcatctctagtaatcggagcgtttccccaacgtctagcaatttcataatacatcaaacctttagcaaaatagcaatgtcccttgtaaaaattctctctatctttgtgcaaattctgaacacgatacagattgtccaatatcaagttagattgaaagattacattatagtgaagaatccagctcgtcccggcaacttttttaaaggcctcaacagagagatttttcaattcatttgcataagagtaatattcattacattggtcatatactagtcccattttgtgatgaggttgcaattgatattgaaaatatacttctcgcattttagcatacatatcaatatacgttttgtgtacatcctgttcattttggaaatagttcgtgtaggttacagcaatttcaggctctacatccaacatatctccacaagaacaacacacgaataatcccgctatatataacaatctttttagtctcatgtttttaaaaattaagagttaaaccaatggtccattttcgtgctaacgggtaagtattaaaatcatcctgcccattttctatgctaacaacctccggatcgacacccgaataattagaaagaataaacacattctctcctgtaataaacgctcttaatccaaccatccctactttcctagcccattctttcggaagattataacctaacgtgagttgcttgagtttcatgtaagaaactgtttcaagattagattccagcatacctcccattgtattcaatgttcccagacgagcatattgagccttatgattattttccgtccagaaagaggccttatccgtattgatatacaatgcctgtccaccttgtccaccattataagcatccaatgaacgaatatcataagttttatacatatcccttcccaaagaataggtaaaaagtaaatttaaatcaaaatcccgccaccttagttcattagcccaaccgccataaagtttcggtacagaagaacctactctcacgaaatcagatatatctatttttccatcgccattgacatccataactttaggatcccctgccgtaaaatattgcgtttcatacatcggcattaaatactttttagatccgtcagcctgataa

SEQ ID NO: 605 - DNA, 2213 bp, Butyricimonas faecihominis
atgattggcttgatgttctttcctgaattagatactcttttgtttgttagaaaaatttattcctatgaaattacgtaagaaaggaaaaacctccaattcagaatggtttggtgtagaacattatcgaattttccatgaaatggatttattcaggtatgtaaacatggagagattaaaaatgttatatcctgatatttttggaaatcccaaaccgaagctcgtcaagaaaagacagcacaactaaatgcttgaagccagcaccctaaatgtccttaaggtgttggctttttctgtttactcggagtatatgatctttcgcctaatggtcttgtaacagctagtgcttttgccgtcgatctttctagtcacgctttcaatctcgaaccagttcgacaggtctgtcgccacagacttcctgtctatttcaagaaaaccgtatatctcgttcaagtcattctttatttccgttgcggttttcaccgttcccgtgtccgtgtaccctttttgatacagtaattccacgatcttgttgccctcggaggttaaagatagttttgttagctctcttttgatgttcgtgacgttgtaattcaactctttaaccctgcattccccgatcttgtaaaaagcgggtttcactagcggtttttgcctttcaatgatcgttgccctgtcgtcctcgaaagagagaatcatgctacccgatctttttaaatcggcatactcgttaaacaagtcccgaaatgactccctaggtttggcaggcattctcttttccttttccacctcgctaacgtgtgcctcgtattgattttttaatattaaacctctcttgcggtattcttcacgcacggattctaaagaagtgtaatcgtgattggttagcttgaaatttcgggtatccatttttaacaggttgggatcgtattccagcgtgttagtttcatcgttccacgttatgtacttcccgtcaaagcctgtcttctttaaactcgctataacggttttcctgtgttcctcttgcatttgattgatcgcctcgacaaacgatttgctctttccagcttgtcttcccgttgccgctctaaattcttcaagactgacgttcgtcctgtattgattcgtgttatacaggtgtgtgacctcggacttgtaaacactatccctcacacgtcccgccacctgtataaacgttgtactcatgtcaagcaaggtatgccccctgtgaatatccgtgataataaatgtctttcctctcttgtcgtaaatatcgcatccctcgaaagcggtagaggtgtaaaagttaatccttttaacgggtgttgtcgtgtcttcaatctcgtacctttcacctagtttagcttgattcttgccccgactttccgttgaacaaacaatcctaacctcttcgggttgcaagctcgcttttttaataacagaggatataaactcgacactgttcacgaataaatgcaagttgttgtctctcggttcaatttctatcaatccaacggtagagttaattaaatcggttgcgtgtatggaggtgatccccgtaatttcgggttcttcccattcaaccttgacaacgggtaatcctgcaagttcatcaagtaaaaattctctatcgacaggcgtggcagtcatgtaagtaaccctgtcgaattgcaggctttgcgcaaccagctttctaatagctgccaatctaaagttatagctatttgtcagcacgtgcaattcatcaacgagtaaatccatgccagtgtacgggttcaccccgttttgttgaagtaaccttgtcaccctctccacgctgttgtaagttgtcgctatttttaacctgtctccatgttcatgtatgtatctagtaatttcctcgtcccttgtatctcctgtcacgcctagcaagtgtttaaactgtcctgtcttgttataaactaggttcttgtaaggcatggcgatcaaggtcgggtaatcgttgtttattgcaacgtgcgttcccccgcaccctgtccttcccttgtcaagaatacacttgttgaaatctttatcgttaaacctgtcactgaatactagccgatcgcatagatcgcttaaataatttgtcccttttggtgctgttatacattctgtttgcattcccattttaaaataggtgtttatatatagataatctctgtttcccgctagacagtttttttaattctatattc

SEQ ID NO: 606 - DNA, 2213 bp, Butyricimonas faecihominis
tcaatatattaagtacaaaattgtgtgataggaggcagctactatgctttagtgaaaaagaatactaataataatttgtatataattaaaaaattgaggaaatcaaatttaattaggaatttttgagaatgaaaaaagtaattatgactgttgacgtagagggacatgatggtagtgatcctgtaacacatcttattatgggaaagactgtggatggtactagttatggtataggtaaacttatggatatttttgattatcatcatattaaaggtcttttttttgtagatattgcagaagcgtgggattatggcgaagcagaaattgctactgtacttcgatatataaagggaagagggcatgattgcggtgtacatattcatcctgatcacatggctgatactaatagattgtttttatgggaatatactaaaaatgaacagagagagataattaaaaaatgtacagatttttatatcaaaattcttggagaaaaaccgaaagcattccgtgcggggaagtatggagcgaatcgtgatactcttgatattttagtagaaaatggatatttatgtgatttttctgaatttgttggtcagcgatggtgtcaaattgaaccaccagtagcgtataataaagcaacacgtttgagtagtggtttgttagagtttccagttacgtcatataaaagttttacgtttgggtcgtattgtagaaatgataaattagatgcaagtatggcaatgaatgagttcagatatttagtacctcgtttggtaatggaggattgtgtcgatccaattgtaatgtttgtacatagtttttccttattagattggaggaaaactccagataaaccaagagtaaataggaaaaatataaaaaaacttgatatgatgcttgcaatatttaaagaggaatcaagtttgacttttgtatcattggatgagttacttgatcaatcaattatgagtgaagatgcatgcgaaactataatatccataaaaggttttcgatcatggcgattctttatgcagagggcttgtagtgtaattaaaatgcgagttgaaacaaaaatgtggaatacaaggagaaggaaaaaatgagaatttatgtattaatggcaacgtatagtcatctttattctagtggagggactatcgctaaagcaacatacgaaatattgcggaaagagggatatgatgttaaagttatttcaactacagatcaaaatatgctgcaatgtaatgatgaggttacatatttaccactgggatggaaaattcgtataggttcgttgctgactcgtatagggatggctgaggactatctagaccgatgggtaagttctggattagagttttttaaaaaggagaatttgactcaagaagatttacttattgcgactagtgttggtgaaataggaacactcaagcttgctagtatattgaaaaagctctataattgtaaatatattgctcatttacatgatcctgtgaagcatgcaaaaatgaatggatataaatacgattggaaacctcatgcttcacgtgaaaagactgaacgtaactatctgatcaatgcggattatgtcgttacatgctgtaatacatatttagaagcattgcacaaaaaatactcttttttgagtaaccgtctagttaacgcacacttcggttggatagagagtgtcgagaaatcaaatagaaaagcagagaatatattaagaattgcatatggaggaaattttggatggccacaatctcctgaaattcttgcgaaagctgtggagggacttgatggtgtagaagctgtttttatcggaaaatatcagaattataaacctatattgcgatttacagataaatctaacattcggttgattgacagaatgagtcatcgtgattatattatttatatgcaaactaatgtagatgttgcttttttatcattaagtaaagaatatttttctgcatgtattcctgcaaaattgtatgattatatcaatattggtttaccgattttagcatctttaccagatggagaagcaaaaaagataattaatgataatcaatatggaattgctgtatcaattgatgtaaacggattacgcgaagcaatttgttctttacttgatgataaggtaagacgtatttttattaataatataaatttggataaaaataaatggaatataaaaaatcaattatacc

SEQ ID NO: 607 - DNA, 2207 bp, Butyricimonas faecihominis
gtatatctttgagaagaattttaattataatattttatggcaggattacctttaatttggattatatttatcgggtttactttgttgagctggctggtgagccatcaattacaaagtcgttttaagaaatactctaagatacctaccgctaacgggatgacggggcgtgacgtggtggaaaaaatgttgcgggataacggggtgcagggcgtgaaaatcggtagcgtggaaggacaattaacggatcactacaaccccacgaacaagactattaatttaagtcacgaagtatattatggtgccaacgtggcagccgccgctgtcgctgcccatgaatgtggacacgctttacagcatgctcaagcgtatagtatgttgcaattacgttcggctctggttccggtggtgagtttcgcgtcacattgggtgcaatggattttgttggcagggatcctgttattacagcaatttccacaattgatgctgattgggatttgtttgtttgctttgatgactttgttcagtattgtcactctgcccgtggagattgatgccagtcaccgggctttggcttggttgcgtaactccggtatcacgacttacgaatcgcaggagagtgctaaggatgctttgaaatgggctgcttatacttacgtgattgccgctctttcttctttggctaccttattatactatatcatgatttatttgggaagaagagattaagtttccgacgtgttttagaagaagatttttaggaataattcattggaaaggggtgggaacactccttttttcgttgtgtgcgggatgatgttgcgttttgttgggagggggagagggttttacttgggctttaaaggggtatatcaagggttgggcatgggaatggtttggctgttgagtgattattgggtgactgttaggcgccatcgcccgattgtcgcccgattatcgcccgatcattgccgccattttaacaggatataaggaaaaataacatacaccggattccggtttggtaaagcaatcatgaagtaacagggaggtaatcaagattcttacctctagttcaacccggttggatgggggactttagggatatttgtcggatcgaggtgatcgctttgaatatattttattgttaggacgtgtaagtcgaagtttttgtgtacatttgtagatgtataacaataagttgcatcatgggaaaatctaatttagttcgttttgattgggctgcaaaacgtttattgcgtaacaagtctaatttcgtggtattagaggggtttttgtccgtgcttttagaggatgagattcacattgaacggatattggagagtgaaggcaaccaacagaagtttgatgataaatttaaccgggttgacatgcttgctgaaaattcgaaaggcgagttggttattatagaggtccaaaataaccgggaactggattatttccaccggatgttgtacgggacttccaaggcgatcacggaatatataaatcaaggggatccctatgctaaggtgaagaaggtgtattctgttaatattgtttattttgatttggggcagggagatgattacgtgtatcacgggtacacggagttccggggaattcatacaaaagatgtattgcgattatccgttcaacaacaagaacagtttgtttgtcatgatgccggagatttattcccggagtattacgtgttacgcgtggacgagtttgataagttagccaaaactcctttggatgaatggattttgtttttgaagacaggagagattgcggagaatgttaccgccagtggtttgcgggaggcaagggaacgtttgcgggtagataagttgagtgatgcggaacagaaagaatacgagcgccacatggaagcattacgttatcagcgtagtgttattcaaacaggatggattgagggaaaagctgaaggaaaagccgaagggataaaagaggggaaggccgaaggacgggctgagggaatagccgagggaataaaagaggggaaggcagaggggataaaagaaggaaaaatagaaggtatgaaggaaggggagaggaaaggtaaattagaggttgcccgttctttgaaacagatgggattatctgttgagagtattgctgttgccaccggattgtctattgatgatattgaatatctggaatagcaaaagatactggaatagatt

SEQ ID NO: 608 - DNA, 2206 bp, Butyricimonas faecihominis
gtataaatgcggataaccgttcatctcctctttatttaaacttttatatgtaatacaaaatttaagccaaaagtgttacttttgctctaaaatttaacatttatgcaagatttatacctgtttaatccggataatgaaatttcaatagccaatgggacaaatggttacacgccaaaggcgaatatttcgattatggccggtgatctggcgtttttatctgcatatttgacaggaaaaggggattacgtgttggtgacgaagatgccggacttcgattttatgaaaagtcgaaaagaaatttttggtctggattgtaaaccgatcatctgggaaaaagctcaattactttcttttaacgagataaagccttggggatggagtccccgggtacacaatttgttgaaagatttgaaaagtcgttgtaacgagcagttcagggagagtgtcatgtcaacgtggcgtgatgaacggagggatttatacagcaggcgaatggctgccacttgtttggctgagatggtacgggctattccctgtataggggagggtattattcctcgtgaatgtaacacgttggcaggaatcaggtcgttgtcggaaaaggaagatatcgtggtgaaagctccttggtcctcttccggtaaaggaattctttttatcccgaaaggacagatgacgtgtaaagaagaggaagttttatccggtatcttgcgtaaacaagggtacgtgatggtggaaaaaagattgaatcgggtgctggattttgccatggagtttgaaatggaccgtttatttcacctgaattttcttgggtattctgtttttcaaacaagtcggcggggggaatacgaagggaacagggtggcatcgaattctagtttggaagggatgattgcaaaatatacgggaacggggttcttacatgaaatccgtgaacagttggaaaaggtggtgatgacggtgtttcatgggaaatacgtgggatacttgggggtggatatgatgatatacgaggacgagtcgggagaatttggcgtgcagccttgtgtcgagataaatctgcgttataacatgggaatcgtttcaattgctttgcagcgttatttacaagagggtgttgagggtgtttttaatattcgcttttctccccaagcgggagaaatcatgcaatcggtggagaagaatagagaggtgcatcccttgctgatggaggcgggacgaatcgtgtccggatatataaatttaacaccggtatctcatgaatcacgctttgtggccgaattgtatgcaaaaagaatttagagtttaaaatctaaaattaatccggggttttgcatcccttctcccggggttttccatgcccgttgcatgacggtggggcgactatggggtggctgttaggcgccatcgcccgattgtcgcccgatgctcgcccgattatcgccgccattttaacagatggaaaacaaaaataacatattcgaatatcccgtcaagaggactaataacgaggctattcacgctcaagaataaaatttcgggctactatatccccggtagaagcccgggataagggatacatcagctgttccagtattttatacattcccattttattctatccttttccaaacagaaggggcaactatgtttcaattatatcaacctcacgctaaataaaaagtttgtaaactttatgaacttttatagagaaaataaagaaaattttattctctttgttgttgataaaaggatcaggcactaaattgttcgagaacgggcaaggggtggaggtaaatcttccgaaagcggtggaatggtaccggaaagctgcaaatgcggggaatgtgcatggacagtataatttgggacgtatgtatgaaaatggacgaggggtaacgaagaatattattttggcgaaacagtggtatgaaaaagcggcagcacagaataatagtgatgcgcagagtagtttgggaacgatctattataatggagagggcgttaccaaggattacgctaaagctatggagtggtatcggaaagcggctgatcaaggtaatatgtacggggagtttaacattggcttgttgtatgaattcggttacggggtgaccaagaatctggatgaagctgccaagtggtatcgtcgggcggcgaatcgggggatggaacgggcgaagaccaaattacaggagttgggacg

SEQ ID NO: 609 - DNA, 2191 bp, Butyricimonas faecihominis
ctaccaataaaataacgacaaccggataacccgtttgtcgttatttccgtatctatatagatggcatgaaaattgctgattattacgaaaaataaatttttatgagaaaatattattggattcttttatttgccgtgggattactaagctcgtgcgagaaagtaaaagacttgagtgatgatgcgagtattgagcgttttgaaatcacatcatacaccccaacgacagccgaactaggagaaatctatcgcaatgacaagtctattattataccagtcgttccggaagataatttatttcctttaacactccaaactgttttagaaacaagttcaacaacccataaagttcttggtaattacgtgaaaggccaagatattgtatttaatggaggagaatctactatcaactttttccttatagcagaaagtggattcgttcatccatattctatcagtttggaagcaatggataccggagcagatattctacaattcaaattcgaggattctgaaaaaatgacaattacaatcaatccctggagcaaaatagtcaatatctccgtgttagatcccggtttcccggttacaataaaacctacaatccggttatcagaggatgctacttttgaaggttacacggaaggagaagaattaacgtttcaaagttttgaggacataaaagaaatcacggttgtttccgctgacagacaaactcgtcggacatggaagattcaattcggagcccttttacaaatcccaaattcggactttgaatcatgggggaaattcggaaacgatattaatttaaatgaagaaactattgaccccgtaccgggatacggaaaaggttgggcaactgcaaacaattacttcgtgcaaggaactcgccctgttgaacacaatggaggctatgctgccaagatgacgacaaacgaacaaaatgcgctcattttcggtaagttaattgcagcaggaagtatgtacaccggatgtttcaaatttgatgttggggcacttaatgatcctcgatccatgactcattttggaatccctcacacagtaagaattaaatccatcgaatttgatgccaaatatgaacctggtccacaattaaaacaagcggttaaaagtggttcaaaatactctatcgaagatcgcgaaggcgtggatgtcggacaagcttttgtcgaaattattcgttggacaggagaaggggcattcgaataccatggaagacctgcagatggtgttgaagttctcggaagaggagaaatcctttttgatggaaaagaaacgaaataccggaactgggctcattacaatatcccggttgtatacacgaaccaaaccgatattcctacacacattgttatcgtgttcagttccagcaaaagcggggatatattcttaggagctccgggtagtactatggaagtagatgacgtcaaactgatttattaaatcattgcaacatgaaatattacatcatatatacactcatatttttaatctgtggagcatcctccgtacaaggacaagagaaggtacggaaaacagattctgtcgattatcgatttgcattaggagttcagttgggtacggatattggtggagccgtaccgttcccgttcaaacatatacccgaaacattcaacccttatcccaaattgaatttatcgttaggtgctaaactatcttttcccatcacttcccgctggtctctaggtacggaactcacgtataaaacgatcaccatgaatgctgatgcgagggtcgaaaatcaacgctatcaagacaaagaacttgttcaatacttctcaggatcggcagaaatgcacatggattttaccatgcttgagatccccgtgtacacgaaatatactctacgtaacgggaaagaccgacttctattaggtccctatttcgcttgggtaatgaagagttcatttgtaatcgatccggagaaagggtacatcggaaccggaggtccagacaaagttgattcaatcatgccagatgatatggacgatatggattttgattcttctttggactcttgggatctgggaatcttaatgggatatgaaagaaaactttcaacccgtttcgaacttggacttcgtttctcttggggattcaaagatatattcaaaagcaataatcaatattttgattatagtatgttacac

SEQ ID NO: 610 - DNA, 2184 bp, Butyricimonas faecihominis
tcaaaaatataatcagcatatttatcttttagacgtaaaaattcccgatctccttcccgcattgttgcctccattacttgaccatctttcccacctaagaaattccaaccgttgatatcatctaccaaaccatttttatcattatcctttccgtctgccttttctttcgaatttacccaaattgcctgtttcaaatcttcatgttctatatccatgcccgctccgattaaggcaacaaccggtcttttctttatttttttcccttttaggaaatcatatgctttatttacctcagctccatacactccatctttatcaaaagaacaattataccaatccaaatcagcttgttttttttctccttgttcattctgttttactaactgtgcatttgcaacactaatgcatgcactcgccatcaataacaagaaacactttttcatactttacagttttatttttacaatacattaccgaacgatctatctatacaaatcgttaatccctaattataaatcacttattagccctagcctttaaaatctcctctttcacccgttctcctcgcagatccttagctaacaaacgtccttctttatcaatcagaacaatgaaaggaatactataaaaaccgtatgctcgttgaattttgttaggcttattaccaatcacgaatccttccttatcccataacatcacccaaggtaacttctcttcttccagcatttttctccagttttcttctttcgaatccaaagatatactgataaactccagatcatcccctttcaattcgttatatattggtaataaattcttcatctcatgccgacacggtccacaccatgatgcccaaaaatctaccagcaccagtttcccccgaaagtcgcttaaacttacctttttcccctgaacatcttgaaatgtaaaatcatatgccggagctcctattgaataataatataagctatccgtccgatgctttaaccacttgccggaagtcgttttcaatgcttcttctgacatacaatccaataataacttgttcggcttgtacgtcgacatatccgagatataagctaacgcactatacatattccctttcaactttccctttatttctggatcaatcgtcttgtcttgtgaaaattcctctttaggcagccacttcaacaattcataatatatatcaatccctgtaaaatttaaggaactactcttcacatcccgacaattgtaaaagccttttattgttacatgggtattggttaaataaattggttgttttgtctcacccaaacaaatcaaatagacgtccggttcaattttacaagcttgtagagaaaatggattattattctttaccatcgttttttgcaaaacctccccctttatattctctaacctcaactccacaggctccaatacacgaatcttaccagataactctaatttttcctgtgcagatagtgtaaacgcattcacgaataaccatatccaaaacaacccaacaccaatatatgtaattttcatctaattctgattttaagagagtgtgataaatattaccacactctttctatttcatattattccacgtcgtttcctattgcttgaatatcaaaatcatatttcgattcaaaaaagtctatcataatcgtgtacttttctcgaattttcccattgacatccacagattcgcttaatactccaccctctgcttccaaatcattaatagaattttcgatagctaacttcagatagtcaaaccagtcattctctaaacttgttctatggtcatgatttaatatcccattagcataaatatcatctgcagatatattatctgaataatttgaaaccatgaaaaactcttgaggagatcccaaagactttacaatagacccgaaataagcaatacacacatcttttttaaactgatttcgttcatcagccgtcattgtcaaaatcttatcacttccccaattaacagcaatatgataaaaaccagcatatacatttaaaggttgacgttcatctggtttaggattataccctaatccaattggaaccaaatctaaagtactgcatagtaatattttttgaggcaagcacgacatcaatgtatcagacaaataattaaataatttatcttgcaataattccaattgattacttacatac

SEQ ID NO: 611 - DNA, 2183 bp, Butyricimonas faecihominis
tctttatattctgtacatttaaatagttatatccggcttttcgcatccatatatttcctgtaacgtcgaggttccccggtagtgaaatccacaagttccacccactcgtatccctcatcttcatcttcgtccccgtatagaatccggttacgctcgttacacatataagtatattcctgtaacatacccatgatcaaggcataactactgtttaatgtctgctcgtgcgtgtaaccgaaagcttccctcacgttcacgagaaacatgaaactacttactggattatccagctttttagattttttcgggcggctatgatctccgcctcgttcaacgggctcatgttctttagtgtcatgatagatttgtaaaaagggttgtagccgacccgaaacagaacggcattcaacaagatacgggtgtcctcccacgtgcaattatccttcagcacttcccggaaccatgcaggaggatcgcttttcttattgtgcaacccaatacaaatgacggaaagaataagctcatcatattttcccataacttccggcaccctcggatcaaacgtcccatccccgtttcccacgatcacctccaaatcctccggatcaatagccaacaacaaaggtttcaaccggaaccacgaacgcacggtaagcggcgtaatcgtgatatatttgtccacccgttttccttccggcacggaatcgagacacgcgaactcgaaaggaatacgaattgtactctcactaacggtgtcgctctctaacgcgataatctgttttatgcccatgtactaattttagatcttaaattttaaatttaagattttagattaaaaaagcgttggccttgcgcagccggaatctcctaatctaaaatcacgaatcgtgaattaaaaaaggatgccccggtatcgctacttttggcatccttttaccggtttaggcttgtgggttcacagtcttcacctcacggataaaggacggtttcaagcttccatcagcggcaatggccgattgacgggtcactttcaccaacaacagatcggtttgttcgctgcccggtgcctggctgatcttggccgaaacagccccgttgacaatggtgtactccacgtatttcccctcgtaaggctgggtggcgatacagaatgctttattgatcgtctcgacactgttgggagcctcccatttatcaccgttttttgtcccgccacaaaaagtgaccagctcgtcagtagtcggtgaaggaatagaaaactcgatactgtcggcatcccccttgcggttgatgatcgctaggggatcttctcgcccttccacctcgatcttcacttgattcgcatcggcaaaattaaacgccacggaacctttgtaaatatctcgcaaccgggtgtatgatgccggtaccaccccgttaaccgcttccccgtaaccgatggaagcaactccaattgcaatacttctttctgacataatttttaaaattaatggttattaaaaatgtttactaaaaatcgttccgattatctatcccctgtcagtgaataattcaccggttcgctttccattaaaatgccggattaccaaaatattctcacattttcatggctttttttaattcttgccgaacgagatcgagcactctctccagtattcgataacgcgtagctatagattccggtccctcccaatcctttacaggacagcactccatgtaataaaatatgaaaagttgccgataattcgaaggtatatccaaccgattcagaaggtcaatgacccaatcatggaaatcctgcaattgttgacttaaagacttttcttgcggatcataactcatgcaatcgacgggcaaagactcgcaaagcacaaatccaatctttttacgggaagacttcagctggtgaaaagtctgccattgaagcactttatattttatggcaccaagaacataaaagtcaagcgtcgttccattctttttcttttcgtgcatgaaatcaatcaaccgggaatcatttttcttttctaaaagttcacaaatgactttatataaaatatcctcggcctcatcttcaatatgatattgcttacttttgtagatagcatattccaaccaatggaaatacctactatcaataaaatttaataattcattaccttccatgatattcatttagattg

SEQ ID NO: 612 - DNA, 2183 bp, Butyricimonas faecihominis
gcttggatttatccttacatatataataagacccactatcaaatgaacatttcagtataaatctatcaggaagggcatcaaagtcaatatcttcaaatcgctcccacattcccaacattggaattacatattcttcaccaattttatcagctataaattttttcgcttcaattttatcaaccatttgatggtagataggctttctgtcattcaattttatccattgcaatttttcttgaaatatttttggagcatctaaattacacttccttttcaaatttaacctatatttcatacgaatgtacattctatcgtttaaaatatacggggctaattgaccaagtatgaaatgcaaaatcaaattgggatgcattaaagctttaaaggctttattaatgaatgttttcgttgtcatatttgaaattttgtattatgatccatcgaaatcacatctcctaattcatcagaagacataaattctacgtccggatacttttgtactattgcttgcaacaatcgtttgaattcaaaaagattcttatcccggtttttaacctctaactctcctacaaaattcaaacgatgcgttgatataattgcaggtttattcaattcgaaacaacatgttaaatcatgtaaacaacgatcaaaaccaagtgaaatatcttgtgtcggttcaaaaaaacaatttcgagttaaataatattgtccacatttattttgctctcccataaagtgatatttcaaagaacttttctctaatacagattgggtctgaacaattcctccttgtaaatattgaatccccacctgtgccgcaacttcttctatacaatcatcccaaatataacaaggtgcaatcatagattttgaccgatagccaaacaattgctcaaacaaatcacctccttctcttattgattgcacaacaaaatttctctctttttcatttttaacattataagcagcaagtacatgtcccctggcatcaatccttttatctatatccattgaaataacacccttatcaaatgctttcatcacctctggttgcttatcttgtaacaacatcaaccacaagtatgcattcaaatgctcccttccatgaaattgaggtttgaacacattatgtctaatcccctctttccacaattcaaaaactctatcatgatgaggatagcgtttcaatgtttctgtaaataactcgtactcatatttcacaaaaccattagcttttatcctttcaaaatcaggattagccaccacgcaatctaaagtcatctttgccggatttccacagccatcttttacagaatccaatacttccatcaacaactctaaatccgtattcgctgctaatgtatcaattttatcatatatacaagaagctatacttacgcccctagatattaactcgtttcttacttccaaagatggcattcgaatacttccccaatcatcactttcaattaccactatatgtctattcgttgtccatcccctacgtttatagagataagtcatagcacgcacacaagcagcaagcatataatatttaaacgatttcatcaccctcttggttttatttctttgattactttcgcaggatttcctgccacaatagtccatgctggaacatccttgttcacaagagaataagcaccgacaaccgctccttcaccaatagttactcctggcataatcatagcccccatacttacgcaagctcccttttttatagttacaggcatacgtttatgaggcaacgatttataagattctcctttataatacaaagacatctctctcttatgacataaaatcaaggcacgactcgctatccaaacatcatcctctatcgttattaatttagcatttccaacatcccaatacacgtcccatccgatgcaaactcgtttacctatattacaacctgtacatcgccacaaataagccgtaaaatattctattttaaaaatacttaaaaaagcagacaacgtagaaaacctcgctatataatttagcacccaacaccaccacgtaaacactttcttgaattgattacctatcttccatataatatacctcattttcatattacagcaaattaatcacctttttcttatcgctcgtataatatcaaaccattcacaggttctgtccctatttaataagttctctta

SEQ ID NO: 613 - DNA, 2172 bp, Butyricimonas faecihominis
tgggtttcccctccggataagtcggatggtggtaggtctcatttgaactctaacctaatctcttgcaaaggagatatttattactcacccttatgggcgcacaccgtcttggcaaaggtcacttccacgccgtagggcgtaaccatttggcggtacgggagtttccgggtaataccccggtacaagtcgttgccagtcgcatacttcacggtgtcagcggtttgtgcgtttgccgcacacacgcccagcaagagggcgaacaatccaaaaatctgtttcattgctaattgaaattttaacggttgataaaatggttattgttgtttggcatacagcatgactttatagcctgctttcagcttcactttcacggttcggaacttcttggcgaggtagccggacgttccttgcagcaatccccttgtcacgtccatagccacctgctgcccggcactttgggcaaaggaaatgcttgtacccagcccgcttccgatattcgccatagcttcgttgaacgcttcctgctccatagaggacgggacggaaagccccttttgcccgtccgtgtcgaacacggcgagttccaccgggatgatgttgccagcgtactcaatcgaggacaccagtatgtcgagccgttcgccctgcacctttgccgttcccgccacaagggtattcttcggcacaacgatatttcccgcctgcatgggttcgagcaaccggagtttcaccgcctgcccgtccaccagcgtttggtcttggtgtatgcaggcggctaccgtgttctttcccatagcgtaccccgtgcctaccgccgtgttgaagccgtagtttcgtggctggctgtaagcccggatgaagtcggcatcgctcatgggctgctgcaatcccgaaacggtcgtttcccggatagcctgcaccggaatagccggagtgccgataccgccaccgttctgcccggctgtcggtatttgggcaatctgtcccctttgtccgtcctgcccgttcatatactttgccgccagctcgtaggacttttccaagagtgccatttggtcgtcagccgtaggcgtggcgttctgctgctgtttcagtcggtcggtcagttccgccacctgccgtttcaattcctctttttcctcgtccacagggggcgtttcgtagaacgtgcttaactggcggttgatgtcccggtaagccgcccgtgaagaagcaccgccgcccctttgtggcttaggatcttcttccggcatcagattgatttcctcttgtggttcttccgtatcatcgtccagcgtgaaaccgaagtcctgcaaggattgtatcttgtcctgctgtttgcggcttgtcaccgcctgctcgtaagccttttgcttgtcggctataatcccgtcctctgcgggcaggggtatgtcggcattgaagccgcccacgccttccacattcacgtcctctttgccggagggtgcgaatatcaggtacatgcaccctgcaaaggcaaggaacatcagcgggaagactatcattttcctgcgctgctgcacctgctgcggggtaagttcccgtttgggtttatcttcctttttcggcttcccgtccgcctgcggtacggtcgtgccgttctcattcttctgtacttcttccatattgcggtctgtttaacgggttgatacttttggttgtgtcattgccgtgcaacggcagttgtctgatgtgttctatttgcagcctttgcccgtcccgtttcccgatattgtagattgatgaaacggtgatgtagatagacaagccgccgaaaaagaagaacatcacgaggataaccgccagccttttgcccggcgtaatccgtccgcacattcggcgcaggcggtcgtccgcccagtcccgcaccttttcgatgtggtttcgttttctttccataaggctatcttttaatggtctgcaaatccttgttctcggtaatggtgaacgcttcgatgataaagccgtgcgggttgttgtcgctccgtgtggcgttaagcaaccggcacgaggtgacaaggcttcgcaccgtcaggctgctttcccggacaatcaactggcgggcatacgtgttcaccttgtaggggtactggtcgaagtcgcacttcacgctgtcaatctccaccgtctgcgtgacgtttccggaaatca

SEQ ID NO: 614 - DNA, 2169 bp, Butyricimonas faecihominis
gggctatatagccccttaacacgaacaactgacaatattaattacaagaaaataattctcattcacacacaaactattgccctatattcattgaaatatacttccttaaagactcatcttcaatatttgcctccaacataagaactaacttttgtaaatcatcctcttgtttcatttccgttttcagatattttaataccgggaacgcaatattcatcgcttcgtcatcatgaaacaatttaaatccttttttacaacggctatacaagccctttacatcttttttcagataggcttccgttatatcaatacatgcagacaactcttttcgtttttccaacttaaaagatttaatctcgtttttcatgtttaccacatcttctattgtactttttttatcataccctttcaagatataactcaactgattataatacacggcatataatttattatcaaccttcgttttacccaacgaccggatgaactcctcccgatgatctaccaaatatttaaaatgatctgttccctttttagtcaacgccggactttcaaaaataaaccagtaactactatccaccttttcagactcatccaacaatcccaataggacagcactcacttccttcgccttattctcctcatatatagacaacagagactgaatataccttgataggaaagccttatcccggtttccctcttcatacaatcggtccagataccccgtggaattctcttctaccattccttcctgtacacgtctcaaaaatgcatccgcctcaccggaaccgagtaatttgtgatacacgctaccatcaggacgcaaaatcaagaacgtcgggaaagctcgtatgccataacgtttggctaatgccggcccttctcctttctccatatcaactttcagacacacaaaatgctcgttaaaataatcacccacaatctcctgcgggaacacatttgaagtcatgtatttacaaggaccacaccaagaagtgtaacaatccatgaataccatactttttgccctttccgctttcttcaaagcctgttccaaagtcagatcctcccaatacactccgacagaagccagcttcttaaaacgactgaaaaaagatttcaaatatccttttaaatcttctccggctgccgattccacgaactgatctcccaatgcagcaactctttgccattgctgtttatctccctttttctccacaaattgcaaagaggttgccaaagtccacagttctgcctgcggcaaattctgtacttctcgttccaaaattgatatcatctcgtttacatcctcattacaacgggcataagccaaggccaatttggtttgaagatattccttacccggcagatcatattcattcaattgctgttgcatcacatccaaccgcccgacatcctctttctttgcaaacccagcaacataactatataacataccggaataggcagaagcaattttctgatttactttttcttccccgatactcttttcaaaagccgctttattctttaataggaaagcaaaattatcggatgtcaaaggagaaaggaaactatcctcgtatattacccaataaggcttagccattttttctttagaagtcaaacgcttcaccaattcatccgccaccacttttaaacgctcattatcataggtatcttgtaacgtcagcacgtaatccaacatgcgttttttcgtcatctttccggtcttgtactccttttccaatacctccaatgtattttctttctgcaaacctctctttacccgaagaatgaactcttgaagttctccgcctccaacaacccgatacgtttccttcccctccggattcaaaagtaaaaaggtcgggtatgcccgtattttaaattgcttggaaagttcctttccttctcctttctccatatcaaacttgacattcacgaaatgagcattgaaaaagtccccggcctccttttgagggaatacctcttccgtcatcattttacaagggccgcaccatgtcgtgtaacaatccacaaacaccatctttccttgagcctttacttgctccaaagcctccttcagcgtgatttgcttaaaatcgactccttgcgaaaatagctgaaaatagccacatacgcatatcaataaacatacaattc

SEQ ID NO: 615 - DNA, 2161 bp, Butyricimonas faecihominis
gtattaaaaggtgcgtttcgacaatgcatctactgtagtatattattgcttaatccaaatgaatattataaatttaggaattcttgctcacattgatgcaggaaaaacttccgtaaccgagaatctgctgtttgccagtggagcaacggaaaagtgcggccgtgtggataatggtgacaccataacggactctatggatatagagaaacgtagaggaattactgtccgggcttctacgacatctattatctggaatggagtgaaatgcaatatcattgacactccgggacacatggattttattgcggaagtggagcggacattcaaaatgcttgatggagcagtcctcatcttatccgcaaaggaaggcatacaagcgcagacaaagttgctgttcagtactttacaaaagctgcaaatcccgacaattatatttatcaataagattgaccgtgccggtgtgaatttggagcgtttgtatatggatataaaaacaaatctgtcgcaagatgtcctgtttatgcaaactgttgtcgatggatcggtttatccggtttgctcccaaacatatataaaggaagaatacaaagaatttgtatgcaaccatgacgacgatatattagaacgatatttggcggatagcgaaatttcaccggctgattattggaatacgataatcgctcttgtggcaaaagccaaagtctatccggtgctacatggatcagcaatgttcaatatcggtatcaatgagttgttggacgccatttcttcttttatacttcctccggcatcagtctcaaacagactttcagcttatctctataagatagagcatgaccccaaagggcataaaagaagttttcttaaaataattgacggaagtctgagacttcgagacgttgtaagaatcaacgattcggaaaaattcatcaagattaaaaatctaaagactatttatcagggcagagagataaatgttgatgaagtgggtgccaatgatatcgcgattgtagaagatatagaagattttcgaatcggagattatttaggtgctaaaccttgtttgattcaaggattatctcatcagcatcccgctctcaaatcctccgtccggccaaataagcccgaagagagaagcaaggtgatatccgctctgaatacattgtggattgaagacccgtctttgtccttttccataaactcatatagtgatgaattggaaatctcgttatatggtttgacccaaaaggaaatcatacagacattgctggaagaacgattttccgtaaaggtccattttgatgagatcaagactatctacaaagaacgacctataaaaaaggtcaataagattattcagatcgaagtaccacccaacccttactgggccacaatagggctgactcttgaacccttaccgttaggggcagggttgcaaatcgaaagtgacatctcctatggttatctgaaccattcttttcaaaatgccgtttttgaagggattcgtatgtcttgccaatctggtttacatggatgggaagtgacagatctgaaagtaacttttactcaagccgagtattatagcccggtaagtacacctgctgatttcagacagctgaccccttatgtcttcaggctggctttgcaacagtcaggtgtggacattctcgaaccgatgctctgttttgagttgcagataccccaagtagcgagttccaaagctattacagatttgcaaaaactgatgtctgagattgaagacatcagttgtaataatgagtggtgtcatattaaagggaaagttccattaaatacaagtaaagactatgcctcagaagtaagttcgtacactaagggcttaggcatttttatggttaagccatgtgggtatcaaataacaaaagacggttattctgataatatccgcatgaacgaaaaagataaacttttattcatgttccaaaaatcaatgtcattaaaataatggagcggtcaggaaatttctataaggcaatacggttgggatatatacttatctccattcttatcggatgtatggcatataatagcctctatgaatggcaggagatagaagcattagaacttggcaataaaaaaatagacgagctccgaaaagaaataaacaatatcaatattcaaa

SEQ ID NO: 616 - DNA, 2151 bp, Butyricimonas faecihominis
ctttaatacatctcggttttttctaaagaatttccccatctttgtaaagatcaggaaaataaaatctccccctcttttttcactgttctgccgggaaagaccgcacgggtatgggagtcgctctgatattatatgccttggggattaatgaacaaaccatgatggaagattacctcgcctctaacgtttacttgagcgataaatatgccaaagaaatcgccatccacccaaatctaaaatctgtactcactgtcaagagagagtttctgcaagccgaactagaccagatcaagacaacactcggtagcgtggaaaaattcctaaaaacagtacttgaagtagatatttcggcatttcggaaacaatttttgtactaagaattctacttttgaattatctttgtcgcttgaaaatacaatgatatgaatcacgattatttcaagcatatattcttatacattattcctttatggataatactcatttccgggtgtaaaaatatcggggaaaaagagatcgtgatcatatcaaccaatgatatacacgggagaatcgaacaattccccaagttggccactttcgtggaacgcataaagacgaaacacccgaatgtcattctagtggatgccggggatcgcttcacgggcaacccatacgtggaccacgcgcaagaaaagggtctacccataatctcattaatgaacgatctgggttacgagatcggaacgctaggaaaccacgaattcgatttcggacaaaaaatccttcgtgccagaattaacaatgcatccttcccgattgtgtgcgctaacatcaattcttcccggagcgaattagacagcattcctccttatcacgtaatcgaaaaagatggcatcaatctaggttttattggccttgtacaaacaggtgtagaccaaataccaagcacgaacccggagcatttgaaaaatcttacttttgacgattatctcgacaaggtaaaagattacagatcactcaagcaacaatgtgacgtgctgataggcctcactcacctcgggatcgaggctgactccattttagcgacacaaatgccggaactggatatcattatcgggggacattcccacacgttactagaaactccgaaagagataaataacgtcatgatcggtcaaactggactcaagctgcaatacgcaggtttgaccatattaaaattcaaaaagggcaagctcaccgaacgctcctatcaatcctgtttgattgatacaattacacaggttgatccttacatagcacggaaagttaactctttcatggagcaacccgaatttaaagaagtcatcggggcaacctccctcccgttcaaatctcaagaaagtatcggtaatatcgtgaccgatgccatgcgatgttcagctgcatccgaccttgccttttacaatcagggtggcattcgtctttccgaacttcctctaggagacatcacgctggaaaccatcctctccatagaacccttcggtaaccatatcgttattcatgaattatccttggctgacataaaagcgttaatactaaatcatttcaaccaaggggatcatatgatcgacctatatgtatcacccgggaattacacgatcatccaggaccaacagggaaagggaataaacgtcatttttaaagaccatcatggtagaccactcgcagaaaaaaacacctataaagtcgcactcaataattatgtaagtattgaatatgattttccagacaaagggaaagggctacatacggatatttccgtagtaaatgcaatggttgactttatccgaacaaattcccctctcgctccaacggataagcgcacttatctatcatccgttaaataacacaatcgcaagacaggccttacacggtgccggagtgaaatgtttttctctattttaaaaaacgttcatttattgatctcaaatatagtgaaaatattgaatgttcaaacaacggcattcatttttaatatatgctgattgtcaacaaactgcattaaaggacttgtgtttagataattatttaccatcctttttttaatgtatcatttattgaacgttttttaaaatagagaaaaacatttcactccggcaccgtgtaaggcctgtcttgcgattgtgt

SEQ ID NO: 617 - DNA, 2143 bp, Butyricimonas faecihominis
acttatacaaagtagtaagaattcttaaaatataaagccggaagttttttcttccggctttatattttaaaggatttgtatgaattaattgggtttaaacaaaaacataagttacgactaaaagtttgcacacattaaccctacaatttatagccgtttcatcacacgtgtttcaaacgtaggggaaacggctataattcgtttatggtgacttatctcgaaacaaactcctgcttaattcttatcaaattgcttttgtcttatttcgcaaccaaatcctttcccgttcttcaagataaggagatacttcttgataaacccgttcattataagcatttaaccaatcgatttccttttgatttaaaagttgaattaatagagcagaagtatcgaaataacaaagagttattgtttcaaattgatagaattctccaaattcattcaccgctttgggctggcacacgatcaagttctcgtgacggattccatgtaaaccttcccggtacaatcccggttcgttagaggttaccatacccggcaacatttcttgattctttaaatccgggcgaatggattgcggtccctcgtgtacattgagaaaatatcctacaccatgtccggttccatgtccaaaatttcgaagattcatgtataatggcaatctagcaactatatcaatattacatcctttcgatcctttcgggaaatatagcatactaagatcaatcataccctttaaaacaagcgtgtaatcctctttttccaattctgtcaattctcccaacggcatcgtacgagttatatccgtcgtaccgtgcatatattgagcgccggaatccacaagatataatcctttgggatgtatttccgattgttgttccggggttgcggaatagtgtggcagggctgcattaggaccataggccgaaatacacccaaaactatccgacacgtattccttatcttgagagcggaaccaagttaattgttctgctgcctccagttctgttacaggttgttgtgataatctattttccagccaataatagaatttagacaacgcaactccatctttccggcaagctaatctaaatccttccaactcagttgtattttttacagccttcagtaagggaataggtgattcgatttcatgtacctcgaattttttcgccagatgattaaaaacagcatagttgcaagtattagtgtccacgaaatacgtgttttctttattctgtgcatccagaaataggaacaaatgatggtaatcatgtaactcgatcccatcttctgccaattgttgttctatttcttgagaaatcttgtctaatttgatgaataaatgagctttatccttttctacaatggcgtaagaaatggctaccgggttataggcaatatcgttacaacggatattatataaccaagcaatttcatccaaacaactgaataacatggcatcaccatgattatcgcatataaactcacgaattttacctattcgttctccggcagattccccgacatattttgtatccaaacgaattattttctccacgggaagagccggacgatcaaaccacatttctcccagcaaatctatttgctcctggatagttatatttttagggcttaatgcgtttttcaggttacgtacatcactaacagacatacaaaagccatcaattcctactttagttccagattcaagcacttcagccaaccattgaggataatctacagcaccgggaatacgcaatttatggagttttatgccggaaccgaccaattctttctctgcttggataaaatagcgggtgtcagtccacaatccagcctcgtttttcgtgaccacgacagtaccatatgacccggtaaaaccggaaatccattttctctgttgccatggagcgggaagatattcgctattgtgaggatctgttccggatatgatataagccgcaatattttctcgatccataatgcgtcttaattcgattaatttctctggtatattcatgactatatttttttattttccaaatgtagagtttttgttgaatataacaaaacagaaggaaattacatctgtaacatcgaaatggcatagatttgaatttacatttgtaatatataaaat

SEQ ID NO: 618 - DNA, 2138 bp, Butyricimonas faecihominis
acgtataacattttatccatatcatcatctacaacattttttaatgataatacgtcaaaaattgaattttgttatgtcttatgttatcatcggagagagactgtctaacaagtttatttttaaacgacaatctctctcttacaatcatccgtcaaggttctataatattaaacatcggatcaaaactatccaacagagaaagcaaaaccttcaactcattaagatccccggtaatcttcattttccccgtatctatcaactcttccggacgaacctcttttaagattaagcgggcaaaatcatttctagtcacttgtagactcaacaatgcgcttgcatccgtgtaacccatccgatgattcagtgctccattgttcaacagtagcatggccttctctccgcaatccttaaaagtcagatttatacaaatacgtttatccccagccttcatcccgttcacttggatggcacaaaaatccagtaacatgtccgcacccaaattacttacagaactagcattcaccaaattcggtacctgacgattaatttcacctcttaactcttttgcccccgtgaggtaaaagtttctccaagggccagattctgcctgatatcccagttgcgtatacacatccgccagtaattgtctggcagtttgattttcaggttccgcaaacactaaattattcaacaaagtagcacaccaacgatattccccctcatcataagctttccgggcaacttcaatcactcgttctccccctccgatcgcctccacgtatttacgtcccaactccaccgggggtaacggattcagattagccggattaccatcaaaccacccgaaatacatttggtactgagacttcacattatgactcaatgaaccataatatccccggcacgcaaataaagaatccaacccgacaggcaatacaagttgttcggcgatctcgttcggagtcaatccttggtttgccatgcgtaaggtttgatcgtgtaaataccggtacatatctcgctgtgcggcccagtaagtatttatcttctcattcccccacgtaggccagtgatgcagggagaaagtcacctccacgtcattcccatagcgagcaatcacgtcatcaatatacttactccacaataaaccattacgaaccttggcgcctcgcaaggttaacaaattatgcatcgtatgcgtaatttcttcggcagcacagaaagccttgtatttcgggaaccaaatcatcatctccaccggagcttccgcttccggaacaaacataaactccatctccaacccatctatcacccgacgttcccccgtggtttcgatctcatccgttggccgcacaagcatactcttaccccgggaattggttgttcccaacccggtcccgatatttcccccggcatgacggggtaataatagcccgtacatgtaagaagcccttcgccccatagcagttcccgccatgacgttctcactcaacgcttcttcataaaatcccttgggaacaatgatcttcatgtctttatttgaaacttcccgacaaatggcgtccattcccccgtaatgatcaatatggggatgagtgataatcagtgcccgcacgggtaaatctcccaaatgttgcttaaccaaacgataaccggccaaggccgacgcttccgaagtggtcgcgtcaataataatccatccgtgatccgttcgtacaaaagttatgttggccaaatcaaatccccgaacttggtaaatagccccgggaaccacctcaaaaagcccgtgaatggcattcaattgagactgtctccacaaactcggatttgccgtcgccggggcttctccttccagaaatttccacgcatttaaaggataggaaacacttccattttcatttttaatggcttcatcttccaatgtcgcgataaacccccgatgcgcatcttcaaaatccgcccgattattaaaattcaaacgagttttcaccgccatattttctttttctgtgtaagaagtcgctttctgttgggcattcccactcatagccaaacaaagcattacagctattcccccggtaaacaatttcctcttcataatacactttcatttaaacataaaacattatctatataac

SEQ ID NO: 619 - DNA, 2132 bp, Butyricimonas faecihominis
tttcatcaccttacttattttataatatatataaaattgatccctactttcgtggggccgatataatctttcgtaccctttttaatatatggtccacaggtttggtatttatacttgtcgtattcgatacgtgcatagcctaccccgatcgtggcttctaagttccatcgtttcccgagaatccattggtggccgtacgcgattccggccccgtagagagtcccttcgtaacggtattttctcagtcccagcatcttgattccgcccatgttgaactcgccgtaaaaagcgtgtagtccccaaaaatggccgttgaagcgttcgcaggtccagtagcgaaactccggttgtatcagccaatgctttacttttttattatctccaaaactccaaggattgtaagtccctagtaaatccaccgtcgtttttcgccccagcccgatttctgccccgacgttaatggtcgtcgtcaaccagtaaagggcatttgttttcactccgactagaggagcgtcgtaaaactttttttcttgtccgtgagatctgcctatcaccataaatagaatcagacctgctacgattattactttcctcatcatatccctgcttactttgttttttgttattacaaaagtatctgatgaaacgtttggattggtgaccataaaggtgtattttagaagtaaatcttttctaatgaaggaattacatttttattttgacttgttttccgagatttttattaaatttgtaagatatttatttcgtatttcgcaacagaaataaatacagactcgtataataaatcaaatagttgtattaatcaaaactcaaatcatgacaacttataattacaatagcgagttaatcaaagctatgaatgaaaaattaccgaatggtactaatttggcgaatacgctaatagatatgttatatttaggtaaagaggccgtgtatcgtagattacgaggggaagtacccttcacgttggcagaggctgccgcgatctcccagaaaatgggagtgtcgctggataagctggccgggacgaacgtggattcgaatgctatatttgatctgaatattatacgtcagaccgatccgttggagacctattactctatcgtggataattacgtgaaaattttccgggacttgaaccatgaccccgcctcggagctttgtacttcctcgaatatgattcctcagactttttatttaaaatatgaactcttgtctaaattccggatgtttaaatggatatatcaatttgaaaagattgatatagagaaacatttcgaggatatagagatcgtcgacaaattgttggaaaagcagcgggagttcgtgcgggaatctcaggagtttcagcacacggagtatatatgggatagtaaattattcatttacctgatcaatgatatcaagtattttgccagtgtgcatttgatctctcaggaatatgttcagaaattgaaaaaggaattactccagttgctcgatgagctggaagagattgccacgagagggacgttcaggacgggacaggaggtatgtatatatatatctaatataaacttcgaggctacctatagttatatagcgtctcctgcctaccatatcagtttggttcgggttttcgcgatcaactctttcgcgacgcgtgacgaacaagtttttaacagtgtgaaagaatggattcattcgttgaagaaattttctaccttgatatcccagagtggggaaatgcaacgtatcaaattctttaaaatgcagcgggaaatcgtcgagggattgtgtgtttaggctggttcaatttttgaaagtgtatttttgtctccgtttcgattagtgaaatgatgatcggggattagaattgtttattgcacaaaataaattaaaatgtaaaacatagtacgatattagaaaattagtatatcgttgataccctgaatgtagcacagaattgtgaagaatatacttcatatttgtactgttgagtgagcgagatgccacttgtatggtatgaattttaaacgtgcgaatcaatgggacaaaaatacaattataattcgaaccgcgtcgggtgagtaatcaccggacgcggtttcgtgatatgtggcaataaactc

SEQ ID NO: 620 - DNA, 2116 bp, Butyricimonas faecihominis
gtattaaaaaaggctatctcaaaagtcattttatttcaaaaaactcctccgtcacttcgtgccacctcctctataaacagaggaggagctggtgactcttcccgaagacagggagcatttcaactctccctctgtttatagagggagtaccccgaaggggggagggagttgaaaaatgacttttgggacagttttttttaataccataatctaacaactcaataattgaccaaaacctaataaaagcgctatcaacaacgtcgttatcgaaagaaatttcaattgagaatccaaggctcttccttctccccaatagacagacttcagatgcattgccagcaacggtagcgttaacaaaaagagatagcccgtccatccggcaggatgcagcacggagtacaacacgagacaaatcacagccaatagcgtgatcacgaaatgatatatctttgctccccgtattcccaagataaccgggatggtacgtttaccacaaaccgagtcattctcgatgtcgcggatattattcatattcaaaacaccggaagagagaaaaccgatggctgcggccggcaatacacatatccaaggtaaaacaccggacatggcaaaataacttcccatcacgctcactaacccgaaaaaaataaacacgaaaagatcacccagtccccggtaaccataagcgctcttcccgaccgtgtatttcacggcggccacgatagatgcgcctccggcaataaacaaagaaatacttttccaattcaacaaatcccgaaatgcctcatagattaacagacttccggtgatgattgctattaccccgaaaacaatcatggcctgtaccatttcccgcatactcaaagctccactttgggcgctccggataggccctaaacgatgttcattatccgttcccttggttaaatcccccacctcattcgccagattagacaatatttgtaaggcaaccgtggtgagcatggcccacacgaaggtcgttgttttaaaatacccatcgcttgctgccaacaaagaacctagtaatacacccgataaggataaaggtaatgttcttaaccgaaaactcgtgatatatgcccgaactttagacatgtattcattcagattttaaattaaactcctccatcagcttcgctgccacctcctctataaacagaggaggaactggtaactcttcccaaagtcgaaaagtaattcaactctccctctgtttatagagggagcacccgaagggggagggagttcattttttattttcaacttttaattctccattttcaacttcagctccttctccccgataataaccttatgctgtttgaataaaccgccaaccgtctttttgtagttctttttgctacaaccgaaaaggcgatatatctcgtccggatcgctcttatccgatacagctaaggaacctccattttcttccagctttttcagtatcaaggctgccaaacgatcaatttgttcatgaccatcatttttttgcaggatacaatcaattttcccgtcttcccggattgtctttatataaccggtcaggtgctgcccgatggttataggttggaatatctcgttacgatagataattgcctcatggctattattgacaataacattataccctaaatccgtacgacgagcaacgattaactcaacctcctgccccaattcatactctgccggggtcttatccaagaaacgacttaatctcgtggaagcaacaatacgatccgtcgttttatccacgtaaacataaaccaagtattcacgtcccacaatcatttcttcccgctgttcccggaaaggaaccagcaaatccttacgcaatccccagtccaaaaaagctcctactcgactcgtacccaccaccttcatcaaggcaaaatcacccacgacggctttaggtattgtcatcgtggcaatcacccggtcttccgagtcaaaataaatgaaaacttttaattcatcaccttccttacattcagccggagccgtttctttcggtagcaaaatctctccccaatattcccctccatccaaataaacaccaaaatccacgatcttaacgaccttcaatatattatat

SEQ ID NO: 621 - DNA, 2115 bp, Butyricimonas faecihominis
acctaaagctataaaggcacttccaagtgtcttaggagcaacattaatgattccaagaaatgaaaattaaatattcatcaattattccgttcaaaggtttcttatgtattaatttatacggaactttgtacgtgagaaaagaagctaaagagagatgggaatctgatcggttccaaagagaagaaactatcaatcatgaacttatacatgaagctcaggcaagagacttttgtaaagtactctggataggatatacaattttctaccttgtatattttatcttatggctagtagaattattacgtccaccctataattctgcatataaagacatttgctttgagcgagaagccaaccaaatgaatttagattatcttgcaactagaaccaagtttgcctgctttacagagcaatattggaaaaacaaaaaggactgatccgtttctggcacacccttttttcggacacaacttttgtgattaggaaaaatagttgattgataacgagttagtaaatgacacaagtacggatttatccgtataaacattatttcgctaaggaaactactcttttcatgtaggtttctatgtaggttaattaataccaattgattcctactaatgcgaattaataataagtcattaactaactcgttatcagtctatgtacacgattaacatcaggggtaagcagaacccgaaagacaccaagatggtcaagctggagataattttcttcaagaccggttacgcccgtgtgccgaaggttataaacatcacagggctattaaaagactgggatgtcaagtctcagagtttccgtgtagggagtgcggaggccactaccaagaacaaactgcttttcgatttgcgaaccaaatatctgcatgtcgccgatacctgggagatggaaggcaggaactggtcgcccgtccagctatcacattgcttcgatgaaatcaaggcggccaaacccgaggtcaaagtaaagagtgtccagcagatgatcgattatcttgaagagacattcaaaaacaagaaacgcatcaagaacggtcagattgtcgacagcacgaccaatgctaaacggtatgtctatctcaagcgtgaactgcaggcgtttacaaaggaaaaatatgaaaaagccttttcctcttatttctttacggatattacagaagagtttcttcttgactttgcgttttggcttaaagaaagaggtatcagaaatggcaacaaggccggacttacacacaaactaaggttgctccgtgccgtatgcaggcaggcagaaaagaaagagatgtacggggtgaatatggataacttcctctgtctcggtgatgatattaattggccggaaaccacttcaagagcagttccggaaacagtcatagctaaaatcgcaaatgttgaccgtaccttgtttacgaaaaaagagcagttgcatcttgatttgttcctgttcagctactataccggaggtatggcgaatgtcgatgtatgtaacctgacatgggatttggtccaggaagaccgcatcgtctatgaacgtatcaagtttcccaaaacagccaaaccggaattactcagtaaagcaaaagccatcatgaataaataccgtgggcaaagttatggaaattatgtatttcctgtttttactcataaacacacgaccactcccaagaagactacacgtgtcaagcaaatttccacacgcctttcacaaaccttgacgaaagcatgcaagatgctgcgcattaaagaaaacatcacatggtattccgcccgtggctctttcatatcgaagatggtagatgccggtaacaatccgtatgtggttgcagagatggctggtaacagcccattgaccatctataagcattactacaagaatacaaagcgggaagaaatcaagcggcagatggaagaaatgttctgaccagacatatccataaagttgtaaacaccttgacaatttctctgatggataaatcatacggtataatggctgttaaaagtcattgattaccaatgtgatatttattatattgacagaatcgctcttattcttgattattttcactacctttgtagtcaataacttaaataatat

SEQ ID NO: 622 - DNA, 2113 bp, Butyricimonas faecihominis
atataataattttttaataacctgtgaattgttgatacacagattcaaaaaaaagaaatgatttgtgagaatttggcgaaatttgtttatatttgagtggcattaaacgttcgtttaatgattcttctacaaaggaatatttgacgcttgtacttatcttaaaactgtattttcggaatatgtgttggtatgtcctaacataaatcaatacttttatcggggcttagaatagataaaaatttgaaattggatctatgttgacctattgttgtcttgtttcgtgcggatgtgtcctatgttatttttactaatcatctgttaaaatggcggcgataatcgggcgactaggcggcgacaatcgggcgatggcgcctaattacctgccaacagtcgcccaacagtcaggtaattttcatgtaaagccctgtgagaaggtgttctcaggtgatataaaaccagaacgggagatcatccaaaggtgatttcggatattctcccgttccgagtaggttggaagtatttttacgattatagtttcgtatcttccttgaaatagttgtctaacaagcggaaggccgcagcaaaagaactttcctcgttatgctgcactttttcttctgcctcttttatttgttctttctggctctggtagaaacgattcctcagttgttcgtcaatggtttcgtacatccagtacttggcttgttcgctgcgacggatgtcgaaatatttgctttgttgggtttcgctgcaatagtgcagtatgttttcccatatttccttgatcccggttttctcgtaagcggagcaggtcatgaccttcggttccacgcctgattcgtgaggggggaagaggtgaagagcattttgcaactgaactttagcaagttcggcacgggtgatgttgttaccgtcagccttgttaatgataatactgtcggccatttccatgatgcctcgcttgatgccttgcaattcatccccggctccggcaatttgtaccagcaggaagaaatcgaccatcgaatgtacggcagtttcactttgaccgaccccgacggtttcaatcaaggtaatgtcaaatccggcagcctcgcagagcaacatggcctctctcgttttgcgggcaacgccgcccagcgagccggccgatggggaagggcggatgtaggcgtgtggatcacaggctaactcttccatacgggttttatctccaagaatactcccttttgaacgttcactactcgggtcgatggcaagcacggcaattttatgtccttgtccggtaaggaatttcccgaacgcctcgatgaaagtacttttcccggccccgggtacacccgtgatcccgatacggacggatttacccgtgttcgggaggcaacggttgattacttcctgtgccatggcttggtggtcaacgcgggcgctttccacgagggtaatggcttggcttaaaatgttaatgtccccgcgaagaatacctgccacgtactcgtccgcggtaagcgtctttttcctcagatgcttcaatctttctgcgatggccgggttcacgggatccggctgttcgatacccttgttgacggccagtccttcataacaagcttcgttttcaggatgttctatattttgttgcatagcgttttaaattaatcttcgacaaagatagagttaatgtggggaagttacaagtaaaaaatcgtggtttcagggtgagtcttatcccggaaagtttattgtatgcaggagcgatgaataacgaggaaggcgagatccatcgcggaatctcgcctcggtattcagggaatcttgatgaaaagagtcccctttctggttgcatttattttcttttttgtaacgttggtttaaattttatcactttccgggaatcaaggtgtcgtcgttctttcgagtacacgttgtaacttattcgcgggcctcgctcttgggtataaaaggaaccgaatcccatgaacgtcacccgtcccccggcgagtataacctcggaaatgcagtcgatcgtagcttgtagcgtcgtgtgaacgtcctttttcttgaatccggtgcgctctgcgataagtgctgtaagttctcgtttattcatatatac

SEQ ID NO: 623 - DNA, 2112 bp, Butyricimonas faecihominis
ggtcggactaattgagaaagtaaatccccggctaaatggatattccgtaccccgttcaaatttcacggttgacatacggaatgggtctttcattcccacactcagtcttaaacgcttgaaaccaatttttttcaatagattttgattaaaatcataagctaactctatacttctacatatcacgttattatcatcttctacaaatcgactagtatgataacttgtgcgggaatctgcatttgcaatatccaaataagcgggaacatcattcacatttttccaacgttcttcaaaagctctccgatccacattatttctcggattcacgttctccacgttatctgcacgagtcgtattatatatttgtcctccgaaattatactcgaaagccatattcaattgccatcccttatatgataacatcgggaaaaacgcaccttttaaccaagcagactcatcacccacgaccactttgtcattaggatcatactccaaggtccaagctccatttcgcttgataaatacctcttctcccgttgccgggttaattcctgcagaacgtacagcataaatggcagaagttgactctccttctttatacaagatttttggagccgaggatccatcagcattagcctcctcgttatattttgccaagctattactaattcccaaaatttcatttttattatggtccccgtttactttcaagctaaaccgccaatcttccaaggctaccagcaaagccgttacttcaaattcgaatcctttgttacgcatctggcccaagttatttcgaaccgtaacttctcctacagaaggcggaactgacatatcaatcaacacgtcatctgttgtcttcacgtaataatcaaatgtcgcactgatacgattatcccaaagatcaagatttaacccaaagttatgagctttcgtcaattcccatttcagatctcgattacccattgttttcggcaccgcaccaataccatgcaaataaaaattttcaccattatagaaataagttgtcacagcttgataaggagcaaaactaacattaccagtgacaccataagaatagcgaagacggaacgtgttcaaccagccaaaacgagttgcgaattcctcgttatgaatgttccatccggcacctacagaccagaaaggagcaaaacgattcttatctccaaatttagaagaaccggaacgacggaaagacccgtccacgaaataacgatttttcacgataaagtttgcatttacaaaaggtcctatactcgtacttatttcttccgacccggtaggacgctttccttcaccaaagcctgccgcaaaatttggtgcatgtaaggaagatttgtagaaaccataagccgtatatccatctgttgtagtagtctccttcattatgtccgcaccaccatgcaaggttaacaagaagtcctctccaaaattttgagcataattcacaacaccccgtccctcatatttcagatactgctcattttcaataagcaaagaaccttgctccgaacgactcgttgcatccttaaacacattagattcaggagaatagaaaacttccgttctatctttagaagttacaatcgtccccgtcccattcacaaaaagaccgggtctcacatcccaacggaaggacaatgaattcgtaaaggaacgacttgaccctttatcataattaccacattcagcctcatacagaggatttgccatttcccatgaaagagtcttgttcaaacgcccatattcatcataaggagaatcataaggattcataaccacgtaatccgagaactttccataaggactctctttccatttcaaatcagaaaaactggattgaaaggacacggtcaatttattatcgacatgataggaaaggaacatattcagacctatcgtattacgatagtctttttgcataactcctttcaccgttcgcacattagcattcaaccgataggtcatcccgtttcctcggccactagccccgatagaattattaatcgtgtaacccgaacgtagaggcttggacatccagtcagtatccattcccttagaaattaatattttcttcctattatattcttc

SEQ ID NO: 624 - DNA, 2109 bp, Butyricimonas faecihominis
gagatgagatctccttacagggtcgtcgtagacgacgacgttgataggccacaggtgtaaagccggtgacggcaaagccgagtggtactaatcacccgaaagttgacgttcggtgggtgagatgatttaattaacgttccaagcgattgtcaatcaaggtgattgacggttgatagaaagcatgaagagatgaactttaaagatattgtcacgttggcaagagtgccacgagaagtgacgaaagttggaaaaacagtgaggtaaggaaatcataattttccattctcaattttcaattttcaattgcattaaaaggtatctatagcgacggtgatccacctcttcccatcccgaacagagaagttaagcccgttagcgccgatggtactgcccttgggtgggagagtaggtcgatgccgaatttagaagagagagcgagttcaaaagactcgctctttttgtatttggacggtaatttgtattattcatgactattttcatttaaggatttacgacttcggagggcagtatgaagaagtttgtgtaattttgtagatagaaaagcgtaaaaatcagaataatatccaaaatgcgcattgcgtgtttctgataactttgttgtatttattgcgcatatttaggagttaggtgcaatttgcggattgctcaacttaattttggaaataactcattaataaattgataattaatagaaaaatgaaaaaagtttttgtgattcttttgactgtttttacggtaacaagtctctcgtttggacaaaatgcaaataaagttttagaagaaggtaaacttttatatcgtttagagaaagcttcttggtatggaacggacatattcttagagaagtttgcacataaaaaagatattgcgggtggctacctatcctacatgaatgaaaaaaatcaaattgtcaatatcttttttgaaaaaggaaatccgtctcagattttagttcgatttgagtttgaaagtatgcctcaaacaaatccaataaaaattgacactataaatcaaattgcgacacaacaagaaatggatttgatcgcaattagacaggaagctgttcagcaagtctatgaaaacaaagagggatttttcaccttttacgaaaacacgtctctaaattttattccattgattagaaatggtaaaaaacaagtttttattttgacaggctcacaagttcccaatgtagtaaatattgggaatgattacttattaatttacaacaaaaagcataagttgacaaaaaaagaaaaactacacaatacacttcttcagtttaaaggaaaatctgatgaccctgaaaatccaataacttcaacacaccattctcacattctttcggatataattaactctactgacatttgtacgttacttttatataaggattttgtagaatggaaacaacattatgtaattagcaaaaagtatgtgtcaatttttgacttggaaaaagaggatcttgttgttttaacaagaaaagcatgggataagatagcaaaatttcaagaaaaaaaacaataaaagcacccaacaagcgtaaccgtttcgcaaccctcaaaatcctctcaaaaaaactgccaaccttgccaaaaccgatttcaaataaaccgttttaagcgaggtttgtttttctccctgaagcaaaccacagcagaataacgcataaaacgccgaaatcgcctgttttcagctataattcctttctttgtaatcggaattgatttcaaaacatcagttaagaacaggttctttaccgaaatcaaaatcggtataggtacttaatgccgttttgaaacccgactaacttcattcactcgactaacagtattgagtgaagctcgttaatcgaccgctatctgtgttcaaccgctcgcttttccataggcttttgagagagaagccatggcttattagggcattttctttacgcaatactccgtacgctaaaaataccccaataagccgagagacttggcccctccggacaccctgtaataagcaaatttttaatcgacattttccggtaaagttaaatcgacaaaacgaagtcgagacaaagggttaatgctattaattata

SEQ ID NO: 625 - DNA, 2109 bp, Butyricimonas faecihominis
tttttatatacttgtcatatatttattagagaatatggaaaaggcgtttttgaatcacgcaattattgagttaacttctgattgtaatttgcgatgtaaacattgttataattggtggaagcaagaggggataaatatggaaagattggggtcttttcgaaaagcatacctgttgttagattatctgataaggaagacaacgttgagtaaagtagtgtttacaggtggggaaccaactattagcgaacgatttatagagttggttttacatgcaaaagtgaatggtgtgagggtaattgttatcacgaatggaaatggggaaataaaagtttatgagcaattagccgcattacaagtgaatttgatggagttttcaatactatcatttcgtccggaaattcatgatcggattacgggagttccgggagcatgggaaaaaatgatgttatcgttacaattgatgttgggcagaggaatagaagtagttccggtaattgtgattacagctttgaattacttgtatgttggagaatgtataaaaaggttgtgtcaaatgggaatacgtcgatttatggtgaatcggtataatattggaggggagggattgaatcagcccatgcagctttcggtcgggcgtgaagctttgcatcaagtttttggtgaagtaaatgagctagcgtcgcggtatggtttggatgttgtttctggtgtttgtactccacattgtttgcttgatccggttgattatccttttattcgttttggaaattgtccgacaaatgtatataatcgtcctttaacttttgatattgttggtaatgtccggatgtgtaatcattctccgaatatagttggaaatgtgtaccgtcaaccgttgccagatattctgttttctagttacgcttgttcttgggatagtatcgttgtcgaaaattgtcgcggatgtaaaaaatggaatatgtgtagaggtggctgtcgggcggcttcggaacaagttgggggaacattgcaacaggttgatcctatcgtaaaagaattgtcattaaaaccttttatttcatgaacatgttacgtaaaaaagtatatagagtattgtatgagattttaaattgtttgtctgttcgatgggattggagatggatcaatgatagtaaaatcttttttggaacagctttggtaattttaagtgttggagaaagcaagaagggacaagctgcagaaagaaaagttataccttcaatttcggagagagctgctgtcagtaagaatgaaatagagtatttcgtgagtacggattctacgggaaagttacgagtggacacgatcagagaaaatgaggaatttatgttttgctatgtaacattgggggatgaagttgaggattcattgacggtttatgcggttgtgtcggatatgcctgtttttcccggagatttgaaacgctatgtaaaggaaaatgtaagatatcctgaagaggctataaaacaaggaataaccggcaaggtttttgtgtcagctattatcgagaaagatggacgaatggatagtattgaagttgcttacggaaaacatcctcttctgaaggcagaggctttgaggttggttaagaagatgcctagatgggaacctggcaggcatcaaggcgagttgaaacgggttagtgttgtaattccggtaaattttactcgggaaatgttggatagcttacaaaataaaaatggtattttttgctatgtaacagaggaaatgccagtttttcctcataaatctcttcaggagtatattgcggagagaattgagtatccgatagaggctagagagcaaaaaattgaaggaaaggtatttgtttcttttgtggttgatacatcaggtttagttgataacgtgaaggttatgaagagtgttcatcctttgcttgatgcagaggcgatccggatcattcaggccttacctcgttgggaaccaggtaaaatgagaggtgaaaaggcacgtgtgcattatgtcgttcctgtaaattttacattagaaaaataaattttgaaatgatttcttgttaatgtggtcgtatgtcaatgataatcatgtgttataaatttgatagattaattt

SEQ ID NO: 626 - DNA, 2095 bp, Butyricimonas faecihominis
gctctccctctgtttatagagggagtacggcgaagccgggagggagttaatttgctatgaatttgtatataagtttctaaataaatttgttatggagcgttttatcgagacgatcaaggtgctggacgggcagttttataatttggaagcccacgagcgaagggcaagggcgacggcggaggcctttttcgggaagcctctcgcgtgggaggtcgggcggatggttgttccggccgcgatgtgttccgggttggtgaagtgtcgggtggtgtatgattcggaggtccgggaggtgagttttcagccttacgtgatgaggcggatcaggagtttgcgactggtgaatggggatggcgtggactaccgctacaaatcgacggatcggtcggtgtttgcccgtttgctggaaaagcggggggagtgtgatgacgtgttgatcgtgcgggatggatgggtgaccgatacctcttttacgaacgtggtgttcgaggatgcggggggtggtctttacacgccggagacttgtttgcttgaggggactaggcggcagagtttgttggacgaggggaggattcaggcgtgcccgatccgggtggaggatattcgtcgtttccggcgggcgttgctggtgaacgcgatgattgggttggaggatgaggtggaggttttggattttagattttagattgaaccccctctgggagggtgtgtcaaaaggtattttatcctcaaaaaactcctctgtctgcttcgcagccacctcctctatgaacagaggaggagctggaatgctatcttgctttaaagttaaaaactaaattctaaattcctttcagcctgtcgatgccggcacggaggccggtgagtttggcttcgaagggggggaggccggcgcggagggcgtctttttcggcgcgggaggcgacagttttttcctcttttttggcccggtcgatggcttcgagttgctcgtcggtggcggtgttgcggaggatggcgaggtgtaggcgggcgtcttcccattcctgctcgactttggcgagggcgatttcccgggccgtggggggcgggtaggagcggacggtgggcgaggagtaggtgccatcggcggaggcggcgaaggtgtagatgaagaggttgaccttgttccagcccgcggggatgacggtggaggtgatgccgttctcgcctctttgccgcaaggtttcgagcataccgcgcatgaggtactcgatggcggggacggggccgtcggcgttgttcacggagaagaggcaggcgaagagcttgtcgtcgtcgcgggcgaggccaccggggatgacttccgcggtctgggtgaaggtgacgatgccctcttcgaggttgacggcgacgtcaacgttcggggcgtcgagggagccggaggagacggacatgttgtcgaagtcgtactccagcacgatttccttggtgtccttgtcgcgggtggcggtgcagagcgttttcacgttcttctggacgaaggcgttggccgggctctggttgcgtttgcgttcaaggaatccctcgcggaggatgactttgaggacgcgggtgactttcccgctgcccccgtacccggcaatgcgcaggtcccgtttctcgcgtttcgcggggtccttgtaggtggggtctttcttgcctttcatgctgccgatgatctcgccatcgggacgggtggagaatttgtgctgtccgatactcttgcgtaattcccagaatatcgctgattttcctttactcatgatttttctttttagaggtgtggtgccgcccgcccggtgtttttgttttatgccggggggacggttttgttttttgtcgtgttacccgcgggggcgtcgttgccggggtgtttttcccgggaacgaggggcttttcccgttcgtgacgcgggggacatcgtgaggggatgttcccgcgtttccgcggtggcggtcacggggtgacgcgcttgccgcgattttcttccggtgcttttctcctcacgaaaagcacttcgttggtggttttgtttccatgttgtagtgcaaagttgaaactattattcggggaaaacaagtaaaatgagtattat

SEQ ID NO: 627 - DNA, 2093 bp, Butyricimonas faecihominis
aggtattatgaattatgcttataatatgacccgggcgattcctctctacggtgaggacggggagttgtacacgtataaaaaggggaattatccatttaatatcattcgggaaatggaggagtctgattatacaattaatcagaggaatgcgagtgcgaatgcacaagtccagtatcgttttacagatgcattcaagttaataggtacggcttcttattccatgggaacttccgatgatgaaacgtggtatggcgagaactcgaattatatccttaaattgaaagatgcgaattcgtccatgactaggagtgaatgtccttttggtggggagttgaaaacaaattcaaatcgtagtagttcttatacattccgggtacaagcggattacagcaagttttgggataaaaataaggaccattttacgaatgcttctatcggttgggaattgtcatcttctaaatataatactacggcaaacacggagcgggggtatctgaaagatcggggaatgactttcgccgcgttaaaaggggaggattattccaagtatccgaaatattttgattgggtgattcggaattatccgaaatatagtaaatcattgacgaatacaacgtcgttttatcttacgctaacgtatagttacaaggatcggtatatttttaacgtgaattcccgagccgattggtctaacgcattcgggagtcgtagtaacgagaaactttttccggtatggtctttttccgggcgttggaatatgacgaatgatgtcgtgaagaatgtgagttggattaataatctggctctacgcgtgtcttacggtattcaggggaatatgcaaaataatcaaccgactcaattaattatcaataaaggcgggtatgattcttcaaaaggaggatatatttcaactgtggagaagtttcctaatcctgatttaaaatgggaaaagacgtattcttttaatgccgggatagatttcagtttccttaaagataaaattcagggttctatttccggttattataaaaagaccgtggatgcctttttgtccaagaccgtgtgtgacgtgaatggggtgacaacttatgtcgtgaattccggtaatgttgaaaacaaaggtatagagttgtctttgaactttaatccgattaaccgtgctgtctcggctaatgggaaaagaggttttgtctggcgttttgatccacagatcgggcagacattgaataagttgttaaacgatcgtatcaaacggaaagataaaacgttacaagatgaattgactctgtcgcagtttttgaatggttctgttcaattgtccggaactccgctgaacactttcttttcattcaagtatgccgggttggataatcaagggaaaccgacatttaaggatttggaggcagatcgggcggaggaattacatgaaaagtacaagaatttgtctaagaaggatgtgtggttggccgtgctagatgagtccggaactcgggtgcctgttcttcagggtggttttaataattattttggttaccgaagttttagtttaacggttaatttttcttatagcatcggtaataaaattagattgttacgaattgcttccggagaatatagtgcggtgtctcccaaaccgatgcaaaatttgcgccgggagtttgtgaatcgttggagaaatccgggagatgaaaaaataaccgatattccggctctggatatagaaggtggtcaggataaaggatggtggaatgctaataaatataaagttgaatgggagccaagtggcagtgccacgatatattctatgtatgatgattcagacttgagggtcgcgagcgggaattatttgcgtttgcaatctttgtccttacgttatttgttcccaagggcgttggctaagaagttaggtttttcttccggttatttatccttgtccggttcgaatttgtttacttggtgtagtaaggacctgaaggggcaatctccggaacaatctggaacttccagcgtggttaatatatctgtccgtccgaagtattcgcttaatttgaatgttgttttttaaaacggtatacgatgaaaaaatatagtat

SEQ ID NO: 628 - DNA, 2091 bp, Butyricimonas faecihominis
ttagttaataatacattgataatcagtatttatatagattttatctgtttttattttcccttcgtttcaatacattggctaatggacaagcatttacagtaggagataccattcgtgtaaatcctaatctaaccttctccaaagatccaagtgacacgcttactttaaattatgaatggcgatttgcaggaaaaactagaaaagattggaaccaaaaaaactttttttggatcgtagatactattgctagagggaatttggagatgcgtattacggatacaaaaaatgggatggtttatctgagaaacatcgctatcagtttaagtagcgaatttgatgcattcggctgggctgtacttgcagataaagacaatcattcatctttaagtttcatcaaagaacgtgaagtaaaagatgaacaaaagaacacgatatttgataatgtagtatatcaaaatatttatgaaactcggaataatggcgaattgttaggacaatctccgctaaaactacacatgcatttctgtcaagacaaatcatcaacgattggtcaggtcatggttatcgaaggaagttcgccttatatggttgacctaaacggtaaaacattgaaaaaagagattacaattaatcaagcctttgccaaccagactcttcccgctgatttcaaaccggtaaacgccatgtttatgagatggtgtgatcttattgaaaattatgacggaaaaatctattccagaatcaaaggaaccgatcaattatttcattctagcgcattcttacaaacaccacttcagtttgaaggtaaagtgcttgaacaatgtcacttgatcttagcaaaatacatgaaaagtgcttgtgcaatagctcatgacaaaaaaaataaccgattattattaatcatggacgcatcctatggttctgccgccggcgcaggagaagtaaaaatttgtccggggaaaccgaacacgggtagcgttgaaggatgggttcccttggacaatatgggtgacaacaaggttattcatattggttacttcacccccaaaggttcagggcaaaaagttggaatttttatgatattacaagataaaaatgggaaatactggactcaagaattcgtgttaaaacgccaatacgacacgtcatcctattacctcgaagagtgtgaacggaatccaatagacttgacttccatcttaaaagaaaatagtatcatttacgcacttccgtatcaagtcgcatcagaatttgttttaatatccagtggtgcagatatttacttatatgaccgtaactcccccaatgataaaattaaacttttctatacttgtgagggaaccgtgacttgtattgaagcagaaagattctatcatcgtcacgctggagttggtacggataacggcaaagttgtgattttgaatatggaaaaagcaaaaaatttagaaaccaaaaaagaaaaagtaatttgggatactcctacaaatataaatttcggaaaaattatagatatccgattcaagacccaatacggtaacgattggaattagtctctttatatatcacacgaaaggactgtggaatttagaagtaccacagtccttattttatagttttatccctaaagattgcactagaaaattataaaagcaatatagccatctaaatcttctcataaatttgtctatcaaaatgaaaaactacttctgagcattaacacgttctttgataacctttgaattcaagtacaaaaaggctagacgaggattcgcctcttgcacaaccaaacataaagaatcggtggtcaattgacctattttctcttttgttgcatactcggccttgcttccatcctctgtaacctcaaatcctttcacgataaggtagccatcttttatttcccaagatttcaattctaaagaaggaatatttattgactcacaaacaccaccttttttgaaattaaaacctttcaattcgcctgttgattgatatgtatagggattacaccattcaccgacaattgctttttccatttctttttgagggtcacttgtacaagcaaaagcaaacaagatcaaactaatacat

SEQ ID NO: 629 - DNA, 2089 bp, Butyricimonas faecihominis
aacttcggcagcttctatgatttcttcccgcaaattattatcaaaaataaattctttcaaagaaggaattgaatctacaattttaggaatggttacctgcggtctcgaaataatatcaatcaattttattttttggcggataggcgaagattttaaactttctaaagtcggattaatttcttcgggtgaaatactaaaattagtaacaaaatccatcaaccgatcacgtttcaaaattttatcttcaaacacggcaaaacgatcttctttcacaagacctaaagaatatcctaaaggagtcaaccgggcatccgcatcatcctgcctcaataaaattctatattccgcacgagaagtaaacatacggtaaggttcatctaccccttttgtaactaaatcatcaatcagtaccccaatgtaagcctgatctcgattcagtacgaaatctctattttcatgaagtgaaagatgggcatttattccggccatcaatccttgagccgctgcctcctcatatccggtagtcccgtttatttgtccggcaaaataaagtcccttgattaattttgtttctaaagtcggatacaattgagtaggttggaaaaaatcatactcgatagcataacccggtctgaaaatttttacattctcaaaaccctccacatttctcaatgcccgcaattgaatatcccaaggtaaagaagaagaaaatccattcaaataatattcggttgtcttctccccttccggctccaaaaacaaatgatgactatctcgatctgaaaaagtatctaatttagtttctatactcggacaataacgaggacctatactttttatcgtaccattaaataaaggactatcatcaaatccttcccgtaaaatatcatgtacgactttattcgtataggcaatatagcaaggtctcttctcaagtgaattcgtatacgcgaaactcagaaaagagaatttatggaaatcattatctccatcttgacgggttaatttagaaaaatcaatacttcgaccatctatacgaaccggagtacccgttttcatccgcccgactgcaaaaccatattctttcaactgatcggataaaccataagtagccggttctgaaattcgaccaccgggaaagctaacccgtccgatatgcatcagaccgtttaaaaaggtaccattagtcaaaatcactcgacgggaactaaaagaaatccctaatctagttttgaccccggtaacctgccctttatccaaaagaagttcgatcacgtcatcctgccacaaatccagattatcagtatgctctaccctatctctccattcggcagaaaaaatcattcgatcacactgagcccttggactccacatagcaggtcccttagacaggttcagcatacgaaattggattgtacttttatctgttacaatgccagatccaccacctaaagcgtctatctctctaacaatctgacctttagcaataccacccatagccggattacaagacatttgcgctatcttattcatatccaacgtaataagtagtgtctttgatcctaaattagctgcagcacaagctgcctcacaaccagcgtgtccggcccctactacaataacatcatatacgggcagtaattgtgacataattatatcattttaagcaattctaagcaatgattttcattttgacgcatctctttcgcgtcagcatctgatttatctttaaaacctattaaatgaagtacagagtgtacgacaaccctatgtaattcatcttcataagttgtattgaattctaaagcattggattgaactgtatcaagactgataaaaacatcacctgacaatatttttctctcggagtagtcaaaagtaataacgtcggtgtaataatcatgattcaaatatttcctgtttacatctaggatataatcatcattacaaaaaataaaagagatcgttcctaattgaaacgaataatcatcagcaacagcttgtagccattgtttcactctctcttcattaaaaaaagaaggaatatcacattcctcattaaaaaaaagaagttcgctcatctatatat

SEQ ID NO: 630 - DNA, 2079 bp, Butyricimonas faecihominis
gtattattacatgataaatagaaataaaattgatatatgatgctaaaactcgtagaagaagataaattattaaagccatttgcaggaattattgaaaaaagacaccagcaagtattggcgatggaacgagaatttacttatcggacgactcgtttgtccgataagtgtaattcttatttgtattatgggttgcatcgaacgaatgaggggtgggtgtttcgagaatgggcgccaaatgccacggcaatttatttgttaggcgagtttaacgattggagaaaacatcctgattatgtcttgaccaaggtcggagatgggaattgggagattaaactgcctctgggagcgttggttcacgagatgctttatcgtttactcgtggagtggaacggggggagcggggagcggttgccttctcatgtgcgacgagtgattcaagatgaatacacgaaaatatacagtgcgcaggtatgggacccattgaatccctaccagatgcgtcatgaaagacccaaacgaacagattatccgttaatttacgaggctcatatcgggatgtcaacggagcatcggagagtatcgacttttacggaattccgtttatttgtgctaccgcgtattgttgatcttggttataacaccatacagttgatggccgtgcaggaacatccttattatggttcgttcggttatcaagtggcgaatttctttgccgtgagttcccgttttggtactccggatgagttgaaagccttgatcgatgctgctcatagtatgggaatccgggtgattatggatattgtccattcgcacgcggtgaataacgaggaagaaggattgagccgctttgatggtagttacgatcaatatttttaccccggagatcgggggtatcaccccttgtggggatctcgttgctttgactacggaaaacatgaagtgttgaatttcttactctcgaattgtaaatattggttagaagaattccgtttcgatggttatcgttttgatgggattaccagtatgttgtactgggatcacggaatcaataaggattttacggagtatagcttgtattatgacggaaatcaggacgagagtgcaattacttatttagcattggctaaccgggtgattcatcaagtcgatccggaggcgatcacgattgccgaggacatgagcgggatgccgggagtcgctagcccaatagaggatggcggtatgggatttgactaccggatgaatatgggaactccggattactggatcaagctattgaaagagaaacgggatgaggaatggcacgtcggagatcttttttacgagttgaccaacaagcgggaagaggaacatacgattagttacgcggaaagtcatgatcaggcattagtgggagacaaaaccatatttttccgcttggtggataaggccatatattcctcgatgggcgtgtttgacaagaatgtaattatcgaccggggtatgtcgcttcataaaatgattcgcttggttactattggaaccgcagccgacggttacttgaatttcatgggaaatgaatggggacacccggaatggattgatttcccgagagagggtaacgggtggagttacgatcatgcccggcgtttatggagtctggtagatgatgaaaatcttcggttccgttttttgaatatgttcgataaggcgatgatccaaatggtgaatgatacaggtgtttttcactggcggccggaaccgttagtgcgggataacgagcggcaggtgttgatatttacccggggggattacctgttcgtgttcaattttaacccggagaaatccttcccggattacgtgtttgacgctccctccgggaagtatacgatggtcttgaacacggataacaagaactttgatggggtaggacgaattgatgaggaggttgaacactttacccgttacgtttctccgggaaggggacaactgagtttgtacgtgcccgcgaggacgggatttgtattaaggcgttcataaaatatatagggatttatgatttacgattcgggtgttgaggtaattgttgagtcatagatc

SEQ ID NO: 631 - DNA, 2078 bp, Butyricimonas faecihominis
aaatgaaacaatgtagctattttttaatatatttacaagcgatctcacctgttaggaatggcgtgttatggtattaattataaaaattggaatgatgaaaaaaagctggttgttgtattttatgggcttgatagctctttgcgggtgtagtcgtatgatcacgaaagaatcggaagagaaggaaatttgttttcaagtggatattctcaagatgcaagaagccgagatagggtcgagggcgggacttaatgtaggggataaggtggggttgtatatcgtggaacaggaaggggaagagctttgtttgccagcaaacgaggatttttacctgatgaatagtgaggcggatggtagtttgagttttgcagacggagagaaacacgtgtacccggacaacccgataaatatatatggattttattgtaaagggatggagagcgtcccagcggatcttttggctgttccggtttccatacccaacgttcaggagacagaggaagctttgttgtcttctgatttcctttacgtgaaatcggaagaacgttatcggggggtggaaaaagttattacattgaatttttgccatcagtttgctaaaatgaaatttcatttcaaaacggataccccggagacggttgatctgaataaaataacggactttaaagttgtaaatgttattcaggagggaaatttcaatattgccacgggtgaattgacgttaggtaatgccgttgacgatatagaggcacgggtggcagaagattttgaagtaattgttttgcctcaaaaaattgaggggaatagggttttgtttcatttcttgctgggcggggaggaaaagtcatacactgtcctgaatgaggggatgccattggagaaggggaaattatataagtgtaatattttggtaaatcggtatccgggggcgggagataaggatgtggtggttagcattcaggttgaagattgggacgagtcggagccaccaattgatgtcgtgattgaagatgggcagaacgtggtggtaacgttaacggatgtttcaaatggggtggtggttgatcgagcggatttgtatttgtcttctgaacatcacgaccgagaagtgcggaatgttcccgtggcgaataataagatggaatttgtgtttccacgagagattgaaggtggaactttacgattaaataaagctcacttccatacagtgacgggagatgagtttgattattattttaaagataaggagttgctaggagataatttagacgagttgtctttggtggccccgaaggtcggggatgcttggggagatggggtgatttttgcggtggggaaagtgacgggatatgatgaaaatgcatcttctttcgtgacggatgtaaaaggaattaatgcttatagggggcgaatggtggcaagtaaatcgttaggaaaattggcttggtgtgaaaaaggagcccaaggggcaaatctatcggtgggtgcaagtgatgaaaataatggtagagagaatatggttgcgttggagaattttatagaattaaataatgataaattggagaattacccggcttttatagcttgtcgtggtttgggaaatggatggtattttccggcatacaatgaaataagatgtgttgttgctaataaagatatgttgaataccaaaattagcgaacaggagggagtggaaatatcgatagaggtgtacagtagttcaacagaagtgttgcgtgataaaaaatatactgataatgctggttataaatatgaaataggtgattataattctacgaagattagtacaatctcggaagtccgagccgttcgtgcctactgatgaaacttctcgtgatggattgacgtaatgctttaagatgaacttgagtatcaatatggatacgtcataatgttgatggggaacgctttatcttcgtgataaagggtatacggcggagagaagattgatgtttcgtcatcgattgcaggcctctccgtgaatttaggctatacgcgtaaggatttgaaaggaagaagcggaataaaacccgcaaaccttttaaattaaagattataac

SEQ ID NO: 632 - DNA, 2077 bp, Butyricimonas faecihominis
atttagaatatacactaccagaagttcctggtatcctttatattggaggcgagggagtgtcatgtggttatttgaataaagaagagaaaacgaaatctgtatttatcaataatcctattactcatgaaggaattgtatataatacaggagacgttgtaaagatgactgtaactggcgatattgtatttgtaggacgtaaagattttcaagtaaatgtcagagggtatagaattgaattaggagaaatagagaatgctttattaaaagtatcaggtattacagaggcttgtgcagagattcaatatgatgtaaacaaacagcctgtagttgtagctttttatgttacagcaaataattgtgatttagaatacaaggatataatgtctgttctgcaaatgaagatacctcactatatgttaccttccgcaatggctagaatagagcagattccaatttctgccaatggaaaaacagacaagaagcaattacccaatattgcgaatcagaaacaaaattttgttaaaagggatattgtaggtccaaggaatgaaagggaaaaacaaataaccttaatctgggaaaaggtattagggataccagaggtaggtgtatttgataatttctgggatataggaggcgactctatccgatctgtaaggttaataaaagaattaaaggaggtcggattaaccaacatcaaattaaaagatttattcgataaacctacgatagccgaactgcttgaacaagaaatagagaataataaagttgagaatctcatttgtatgaaaaaggtttctactccatatgcaaaacttatatgtcttccatatgcagcaggaacccctggtatgtatagtacattttctggggattttaccggagaaatcaacttatatacagtacaatatccgggacatggagatggacgtgagataaagtcctctgtagaagaagttggtgcgctattagccaatgaactgaaagaggctgataaagagattcctttgtttatcatgggatattcttacagttgctatattgcttatgatatctgtaaacgatttgaacaagaaaatattccgatacagggtattataatgattggtggaactcctcctacattgcgtgatgacttaatgcaattcttttcaaatgacgataatgcccttttggattattcacgtgcaaaagatctgttgaatgaagaattgatcgcaactttatcagatgaagaaaaacatgaatatttgcatgagttgagaatgaatactgtagcaatggtaaattacaagtttcttgattgtaaattgaaaaccccattatgttccatcgtcggtagagaggatgagcctacaattcgaaacaatcaacatctatggaataattactttcagaaagtttctttccaccaattgccaggagggcatgttcttattacaaaatatcatgcggaattagctaagttgataatgaattatatagaattgcatgtataaatatgcttgtattacccttttccgatatagcagtagaaattgtggaagatagtccttttgctacttcagataatctctttaatgaggaaaaaatattcattaaaagagaatggtctgaaatacgtcttaaaacttatattttgggacgttgtgccgcacatcgtgccttacagactttacaaaaggaaatagttcccattttaaaaggaagagatggtgaaccaatatggccatttgacatagttggttctatatctcataaagatgcaatagcagttgctgctgttggaaagaaaaagaggtataagggtattggagtagatattgaagatcaaacgacgatattatcaaaaaaggaatattctcttttttgtacaccccaagagatagcgtgtatagataagaaagaattttctcctattgacattttttcacgtaaagaagctattctaaaggcatattatacagcatatagtaaattatgcaattggattgatattgacacgataaatgtatctaaagcttccaatgtaactataatatgcatgttaaaaaaaaattttattataaacctatgt

SEQ ID NO: 633 - DNA, 2070 bp, Butyricimonas faecihominis
gtataaagttatgaaacagcatataatttatttattattattgatggctttggcggtcgcttgtagtgatgatgatcagttgaccccgacggaaactcctgagttcgggtatttcgtgccgcaaggagaacatgattacgatgatcgtatcgtggattggaaagagagatgcaatacattcattttgtataaatttaatatgaaagagttgtattggcaagtgaatggttggtatgagtcaaaaccggaaccggaaggtagttactaccctttcacgaaggggttgagaggtgaagttgctgatgaacagtatgtgggggaacagttggatttgattgaatcgttgtttttgaacttttatccagatacaaccttgaatcgttgtttgccgttgaaaatattattgtgtagtaagttagacgaatattctgcttatggagacttgagtaagacattcaatgtgtataacggttatgattatttagcgtttaactggggaaacgaaagtgtgttgaccttcactgatgtgcaaaagaatagttttagaaaagaggtaaataatgtttttcttacacgtttgttggataaagccaaagtgatcgtggatccggcattctacgaaggaatgaattatgagagaattacggctactgacatgtactctcgtggttttattaaagctggaacgaaacaagcggacgatgctaaatattttattgaagctatcatttcgaatccgtatgaggatttgattgcagaaaatacgagtacgaatacgtatgtgggtattttaaatccggtgaaggatgtgaacggtttaattcggaaaaaatatgagattcttgtaaatagtttcaaggagaattatgggatcgatttgcaggcgataggagatgctgagttgaaataaaaaagatatgttgaaaattctatttatatttttagtctttctcggggggattatccccgggaaagctcaaaaaggcttaacattatctggtaaattacggctattgtctcccactgaagttaaagtgacttctattgatggaaacgagatattctccatttccgtggagaacggaaaagaatttcgaaaaggaccggaaaaaatagtaccggatgtatatatcttaactattggtagcacgaaacagcctatttatttgacgaatggggatgtaacggtgaaaggattttataatgaaaaagctccagagagtagttcgttggcttttacaggaattgacgatttcttggagttatcgcgatggattccgacggaattatctgcaaagaaacgggtcgtgaatgctgaagtaaagggaaaattgcggggaaatatgtatagtgctttagcttatattgcagatatgacgcaatgggagtctaacaaaatgttattagagcttgttcctgaggcagatcggaatacaacttcagcccgttggttggcacaccgggtggatagtttaagccactttgccgtgggggcacaggcgtataattttgaatttgtggatccggagggaaaaatggttaagttgagtgattttcggggtaaatttgtacttgttgatttttgggcttcttggtgtgggtcttgcaggtatgagatgaaatatcttaggccgatttatgatgaattgaaaggtgatgatcttgtatttatcagtatatctttagatagacgggaaaaagactggaagaaaatgcttgaggaagaaaaattaccttggatcatgttgtgggacaaggaaggatttacatctggaaacgaacctaacatgatacagaaagcatacggcttttacacgattccttttatcgttttaatcgataaagaagggcggattgttgatcgggatttgcgaggagaaaaagtccgggaggcgatagagagagcaagaggaaactgattttgattttatattttttgagttagcgttttttgatttactgcaaaatggtgaattaaaaaatcgactagatgattttttggatgtttgaagttttgtatcgtataatataataaattctgtagtaatgaaaagatattctcttttattt

SEQ ID NO: 634 - DNA, 2066 bp, Butyricimonas faecihominis
attattgttctatcttctatcctaaaatggacaacttgcgtcgattcgatcacgtccaacacctccgtgaaatcatcatactttttcaccgctcccgtaaacgaaacttctttcaatcgctcttccgtaaacacaatatcgacatcataccaacgggctaaatgtttcaacatatcgcctagacgaatacttttaaacaccatacgccccgtgatccaagcggtgtacatatccacatcaacttctcgctttgcaagcttacccccaacaagacaaccctgttctcccggttccagccgaattcgattgccagccccacgctctttcaaatcaatagctccccgcaccaaagtggccgccacttcatcctcgttgggataagcgtaaacattaaatgccgttccatacacccgcaccttcgctttttccgtctcgacaacaaattgtttttgtttatcacgcgtaacgtcaaaaaacgcttctccctccaaatacactttccgttcattccccacgaactccaccggataacgcaaactcgtttccgcattcaaccaaacctgcgttccatcactcaaaatcaaggtaaactccccacctctcggaaccgtgatcatattatattgttcctctttccctccttgaacctcagcaacctgatactttatcaccccggagtcctgccggatttccacgccatattccggttcgatgctccgggaagaatcagacgttaggaataccgtctttccagaagctagttgcaacgttgcccgcggctttcctgccaataatttcggaatttccttgtgttcctgtccttccccgaccggggcatttcccgtctgaatataataaaaccaaatgcccatacaggcaaataacaacacggccgcacaacttcccaaacggataattcgccttttacgtccggccaacctcaatttctttttctgctccaacaattctttcaatgcatcctcccattccacacgcccgtaagccagaatctttccagaagcgacttcctgacgaaccaactcttcgaacaacaatttgttacgaggagatttatccagccaaccattcagttcttctttttccgattcagtcatactccccaacacataccgggaaatcatttctgacacctgaaaagtttcatccgctctattcataattcattctatttatgcctttataaataaaacaggaatggaaagaaaacggggggatcaaaatgaagaaaaaaataaactatttttacaaaaaagaagaatttaaaagaaaataggaataaacaactccaatcctaaagatcgtaaccggacactcaaccgtttctttccctctttcttatactccttggcagtctctaaagaaatacccattttttccgcaacttcagaaatcttgtacccatccaacgaaagcatcatcacgttgcggtattgtcgaggcaattcctgcacgacttccaaaacccgcgcataaacatcttcctccaaaacccgatcccagaaaagatcgacatcatcaaattcccgcaatacaaatgcctcgtaacgccccttgacctgttcatgctggatataattcatgcacctattttttaccgaatgataaagataaacttttaacgccgtgacattctcgaaatcctttttctgccccagcatggaaatgaaaaactcctgcaccacgtcctttgaggcctcttcattgttgatatattgactggcaaagagtaccatcggcacgtaaaactgcttatacaaaagagtataagccatatcatcatccttggccagatgttctaaaagtatctcttgctcgctctgcattaatcctcgtaatcacatgattaaaaaaacaaataacaatcaacaatccttcgtttattgcaaccaaaattaaaggaaataacctgtttttcctaaaaacaaatattctttttttatcattgatagtgattttgttaacgcaaaatgtaacaaatcatttctattgattttcttctcgttttataacaatcaataaacgaacgttttattatattatcacac

SEQ ID NO: 635 - DNA, 2060 bp, Butyricimonas faecihominis
tgtctactttctttatccaaaaatttattaaatgatagatttgcccggacactataattttcatttttagtattatttaaacgcagttctccaccaacaggcatttccgaataagaagatacccccacattatcttgcccaggagcatattcttttcttaaattagccgcataccaacttttttcaccgaaataaaccctctcttccaaattagagattccgtaagaaaattggactcccgccttcaaacaagggattaaacgatattctatatttgtacttacattaatagcgttagtttggatattatcatccgtattttctctttcattaataatactaaatggcttggaatacgtgtgttccaaatcatcatctctttgataaaacatcaaactgccatcctcgttataggcaccgacactccgggcagtatttaacgcataggtcattagtccgacctcttgaggggtgtattgctttttctgcacactcccattcaaactaaaagacatcagaaacttcttatgattaacatccaccttggccattgcgctataacgattattttcctctcctttcaagttaccattttccgcagaataacctaaagaagtgtagtaccgaacattctcagatccaccggaaatgctcaacgtgtgcgcatgagaataggtatcttgcattaacaaccccaaccaatccgtgttgacggtctccatgtattttactttccgaataaactcatcggaagatattaccccgttcacgtaatcgttgtaagccgcttcataccccacgtaactagataaatccggaataagttgttttttgcgtacaacttccttggaaaaatcaattcgttccttcgaattcatcacgtcaacggaacggtccgtgtaacgaggacgttgccggaatgtacccgataaagaataagaaacagagggagctccgacttttcccttcttcgtggtgatcacgataacaccattagaagctttaggcccgtaaatggcagtagcagacgcatcctttaacacgtccaacttttcaatatcctcgggattcaaaccggaaatggcatttcccaacaagttcacgaaatccaagtcattaatactcgcaggatccacgtttacaggatccgttaaaatgactccatccaacacccacaaaggagcggtacttcccaacagtgttgttgttccgcgtattttaatcttgggagcggcccccacttgcccgctattctgcataaaaatcattcccgggattctaccttcaagcatctggtccaacgtgctgactcccggttgcatgatatcatccatcttcaacgtggtcacggaactggtcaaatgacgtttatccactttataatatcccgtggataccgtgacttcatccaactccatcaactcctcctccaaaacgattcgtaatgtatccgttgctacagtaaaatttacaagctgctttttaaagccaataaaagaaaattccaaagcgccctgttgcatgggtaaggctatcctgaaccaacctttcacgttcgtggaagttcctattgatgtccccgcaaccttcacggttacaccaggcaaagcatgacgatctttatcgtacacccatccttgtatcactttcgatttttctttctccgatgtcacgtttttttctttaataaccacaacatttccatcaaaagaataggttaaccctaaatcagatagcaacttttctaggactcgcacaagctcttcattctcagcttttacactgaccattcctttcgtcttcagcaaggcataattataaaaaaaatcacacttcgactgtttacccaactcttctaaaactgttgtcaagaagacatttttcaaatcaattgtcacctttacatcctgagctaatccttttgcgtgcactgacatacacacgctaaataataaaactcctaacaatttcataaacattaacattttgcgccatgatatccaatagaatgaccagacgccatttcgtttttttttcataaatttgttattaaattatac

SEQ ID NO: 636 - DNA, 2053 bp, Butyricimonas faecihominis
ctcttatatgtcaatagatttcgattcattattggaaggcgttaataaaaaagatatgcgggcgtgggaagagctttatgcaaggtattatgccgtgttgtgttcttacgtgaacaatatcttgcgggatcgggatcaggctcaggacattgtacaggatgttttggtggctatctggaaatcttccaagcagtttggggatatgaaggaactgacttcttatttatatcgttcttgttataacaatgcgttgatttataagcgtaatgttcaaatccgtaagggtatagaacaaaagatcgtattggaggctgaggtggaattttctgacgagatctttgctattaccgtgagggatgagttattgagacagttgtattgttatatcaaggaattaccggatggtgcaagggaaataatggaattaagtattttggggttgtccgggcctgaaattgcagaaaagttagggatcacgattcacaccgtgaaaacacagaaaagtaggagcttcaagtatttacgagagaagttgaaagattccgtgctgttatttttaatttgaccgaaattttttatcgtttttgtcatactctttatgacttcatgtattatacaattaaacgatcgtttttttattgtcaacaaaacgcttaatatctcgttttttgccttttctcatgtttctcacaaccaaacagttacttttttcataatctaatattggcttatccgtcatttctattaagaaacgatccattattgatatttcgagttttttctcgaaatcgtggtaaatgcttggatgatataaattaatagaagatgaaattggatttacatagagtggtagagttgtttcgaaaatctttttcgacttcactttccgatgcagaaaaagaggaattggacgaaaccttgcaagatggttgtttgaaggaggtatatgatcaattatcggatgaaacttttgtactggataaattccgggaatttgaaatatatagctataaacctgcctttaataagttgaaaatttaccagcgtcatacccggatgagcaagtggatagcttggggatcgtctatcgctgcgattttgattcttgtgtttgtgttggttcgtccttgggaatatcatgatgaggtacaggagttagttgaagtaacgcaacatattatacctcccgggagtaatgcagctattctaaagttggctgatgggagaatgatcgagatcggggaacagcctctggaacttaaagatgttcaaggaagtgtggtgaaatatgaaaacggacgtctttcttattcatccggagaagaatgtgcgataaaggatgtctacaatgagttggttgtgcctattggtggagagtgtcatgttcttttggatgatgggacggaagtttggctaaatgcagattcaaaattgaaatatcctattgcgtttagcggggaaagtcgtgaagtgatcctgtcgggagaggcttattttgatgtgaaaaaggatactcgtccttttgttgtaagtctggaaagtggtgatgtaacagtacttggaacctcttttggcgtgagtgcttacccgggttatccgaattacacgactttggtcaggggaagtgtccgttttacttctctacgacaggaacaagttgttttgactcccggggaacaggctgtagttaatatttccggaactttggaaaaacggaacgtggatgtggaagagtttgtcgggtggaaagatggagtgttcattttcaaagataaaacattggctgaaatcatgcaaatattggagcgttggtatggagtaaacgtgatttttcaggatgaaagcctgaaagaattggagtacacgggtagccttgaaagatatgattctattaatacattcttgcaattgttggaaaaattaaaagaaattcggtatgaaataaagaaaaatacaatcgtcctatttaaataaaaagagaaagacagacaacaaatttctcaggttcggcgtctgtcccttctcgatttatattattaatataaactacaat

SEQ ID NO: 637 - DNA, 2052 bp, Butyricimonas faecihominis
tgattattcgatctcgtaccgctgataatttcgtcttcacggcgtaataacgacgacgaacagggggaaaatttaattctgacattggtttactaagtttactgtaaacttttttcaggacaatacataccaagaattacgggaaaaagtagataatggttttaattatgattggttaggctatccgacaagaacaggtgtaggacaaacccatagtttgaatgtaatgggaggaagtgaaatttggcgatttaacgcaagtttatcttatgacgagacagtaggtgtaatgaaaggctctgatcgtgcaaattttaatgggtctttaggtataacttatcaaggtgaaaaattgattgtgagtgaaaatctttccgtggggacaaataataatgctaatagtccttatggagatttctctagttttgctgcaatgaatcggtattgggaaccgcaagacgaagagggagagccgattctgacatatacacatcctttgagaagtgaaacaagttatagtgataaccctgcttataatgcactggtcggggtttggaataaaacgagatatacaaatatgcgtagtgccacccaggtgcgttataatataaacgagagtttttatatatcagggttgttgggattatcccgaatgtttaatcaggcagatgcttttgctccaccttcccatgctcagtttgccgggaaggagacagatcaaaaaggacgtttccaacgcaatgagatcgagtcaaatcaatggaatgtccgtttgaatgtaaattatgctaaaacgctgcaggaaaaacatatgctgacattaagcggtgcagcggaaatggaagagaaaaaacaagagcaaatcatgtgggcggcaacaggttttgccgcagataatattgatttcccttctatggccttgggatatggtgatgagacttatccaaacggatctgtgactacgacaagaagacttgctttgatatttgcgggtaattattattatgatatgcgttatttcgtagatattaatttcaatgcgaatggggcatcttctttcggagaagatagtcgttggggcaaatttttctcttttggattgggatggaatgtcagtaacgaagacttttttatcgagcatgttccgtatatccaatggttgaaactgaaagcttcttatggtgtgtcaggaaacatgggattttctccggagaatgcgatgacagtctattcactgaatacgcaggcgaattatttgtctcatttcggtgcttatttgacatcttttggaaacacggagttaaaatggcaaaacacgtaccaatggaactttggtatagaattgaaaactttgcatgaatgtttgggattagagttcagttattatcggaagatgacggataatactgtagcagatgtttttttgcctatttctcatggttttaatacatataaagcaaatgtcggttcaattttgaataaaggttgggatgttaaagttacggttgacttattcaaaaatatggatcgagggtttacatggaatatcatggggtcatttaacggtaataaaaatattgtagacaaactttccgatggtttcaaatacacgttatcacataatgtgactaatatgagttctcaagaagctgtgttgaagtatcgggaagggcattctatgaatgctatttatggtttgagaactgttggagttgatccgcaaaccgggaaccgtctgtttttagataaaaatggtaatgttacttttgctcaaaatgcagaagatatggtttatctcggtgatagccagcctaaagtgcaaggtaatatatcaacgaacattgcctataaaggttttatattgacagtcggttttggtgtgcgttggggggcaaaacagtttaatgcgacattggctaataaaacggagaatactcactttattaataatctggatcgtcgggtgttaacacaatcatggcaggaaccgggggatgttgttccttataaaaaattagatattaataatacatcttctaatacaaatgtttg

SEQ ID NO: 638 - DNA, 2039 bp, Butyricimonas faecihominis
tctaatttacgtgtatggaagttcgttatggatttccatgtcgtgtataaggaaggtgttattgggtatgaaaaaagctgtaaacttatttgtttacagcttttttatgtagatgctagaattttatttcacttcctcgaagtcaacgtcagttacttcttggtcttttccaccattgttcgcttgttgttgttgatcagcgtgaggggctccttgttgtgcaccgccttgttgttgttgggcattgtacatttcttgagatgcagcctggaacacgttgttcagttcatcaatagccgaattgatagcggtaacgtcctgagccttgtgagcgtctttcagtttttgcagggcagcctcgatcggttgtttcttgtcggcaggcaatttgtctccaaactctttcaattgtttttctgtttggaagatcatgctgtcggctttattgatcgtgtcaatccgctctttttccttcttgtcagcctctgcattagcggcagcctcgtccttcattctcttgatgtcggagtcggaaagtccggatgaagcttcgattcggatagattgctcttttccagtagctttatcttttgcagatactttcagaataccattggcatcaatgtcaaaactaacctcgatctgtggtactccacgcggggctggtggtagtccgtccaagtggaaacgtccgattgtcttgttgtcttttgccataggacgttctccttgcaacacgtgaatctcaacagacggttggttatcggcagccgtggagaatacttctgatttcttggtcgggatcgtggtgttggattcaatcaacttcgtcatcactccacctaatgtttcgatacctaaagaaagcggggttacgtcaagtaacaacacgtctttaacttctccggttaatacaccaccttggatagcggcaccaacggcaacaacttcgtccgggttaactcccttggaaggagcttttccaaagaactcctcaactttcttctgaacagccgggatacgggtagaaccacctaccagaattacctcgctgatgtctgatgcactcacgtttgcattcttcaatgcacgacgacaaggctcgatcgtagcttgcaccagatggtctgtcaattgctcgaattgtgaccgggtcaaggttcttaccaagtgctttggaattccgtcaaccgggaatatgtacggcaagttgatttccgtggaggttgaactggaaagctcgattttagctttctcggcagcctctttcagacgttggtgagccatcgggtctttccggatgtccacgttctcgtctttcttgaactcgtcagccaaccagttgatgatcacgtcatcgaagtcatcacctcctaggtgggtatcaccatcggttgattttacctcgaacactccgtcacctaattccaagatagaaatatcgaaggtaccacctcccaagtcgaagacagcgatcttcatatctttatcttgtttatccaatccgtaagccaatgctgcggccgtcggctcgttgataatacgtttcactgtcaacccggcaatttctccggcctctttcgtagcttgacgttgagcgtcgttaaaatatgcgggaacggtaattaccgcctcagatacctcttgtcctaaataatcttcggctgttttcttcattttctgaagaatcatggcagagatttcctgcggggaatatttacggtctccgatttcaacacgcggggtattgttttctcctcttaccactttataagctacacgattgatttctttatctacctgatcataggtttcacccatgaaacgtttgatagaatatattgttctcgtcgggttcgtgatagcctgacgttttgcagggtcacctacttttctttcgccattgtcaacaaaagcaacaatagatggtgttgttctcctaccttcactgttcggaatcaccaccggctcgttaccttccattacggcaacgcaagagttcgtggttcccaagtctataccaataatctttcccatat

SEQ ID NO: 639 - DNA, 2023 bp, Butyricimonas faecihominis
gtttctgtcttttgaattgactatatttgtaataaatattttggttgcaacgatcatgaaaacgacaaaggaatatttgcagttattacaggcatataaattacagtctgcgattcgatatgggatttctcgcatcggaatctttggttccgtggctcgtggagaacagcaagaagggagtgatgtagatgtttatgtcgagctttcctctcctgatttgttcagtttagtacatatcaaggacgagttacagcaacttttcggttgtcctgtcgatgttgttcgcttgcgggataatatgaatgaattattgaaacgttctattatagaagaaggaatttatgcttaaagaagaaattttgatagactctttgcgtaaaatagagcaagcgattgatcggattataaaaaattctgcttgtatagatagttatcattattattataataccccatccggaatggaacgtttggagagtacttgtatgttgctgatagctataggagaaggattgaaaggtatagataagattacagataaacaattgttagtgcgatatccagaaatagattggaaaggagcaatgggaattagagatattattgctcatcattatttcgatttggacggagaaatcgtttatagtgttgtcaagacaaaacttcctgatatgttgattaccattcgtggtatattgaaagagataaaatattaaagaaaaatggcactcggtttcgggtgccattttttatatcatgaaaaatgaattacatgaggaagtgatcactgatcgatttatgctcgtagatgttgcggatcgtgtcggcaaacatgggagcgatcggtaatactttaatttttgagcaaggttgtttctggggaatggaatcggtgaagattacttccgtcagttttgatttctcgatattttcgtatgccttaccggagaggactgcatgggtggccacggcacgtacgctggcagcaccattgtccataagcatatcggctgctttgcaaattgttccggccgtatcgatcatgtcgtcaacaacgatgatatttttgccctctacatccccgatcactttcatgtcggcaacttcatttgcccggatacgggttttgtggcagatgatcaaccctgaatcaaagtattttgcccaggaatttgctctcttggccccaccgatgtcaggggaggcaatggcaaaatcacgtaatcctaaagatttgatgtaaggaatcaacacggtagaaccgtataggtgatccacgggaacatcgaagaatccttgaatttggtcggcgtgtaaatccatggtgataattcggtctactccggctgcttgtagcatattagccactagttttgccccgatggcgacacgcggtttatctttccggtcttgacgcgcgaacccgaaataggggattacggcgattaccttgtaggcagatgctcttttggcggcatcgatcatcaagagtaattccatgaggttatcactgggcgggaaggttgattgcacgataaatacgtgttcgcctctcaccgtttcgtcgaatgaggtgacgaattctccgtcactaaatctcgtaaacgtttttttaccgagttccagccctagagaactagcaatactttctgcaatatattgactattctctccggcgaaaactttaatttcgggaagatttgacatatctaattcattagttgaaacacttggcaaaagtatgaaattattttgttccaccaaaggaatttggtggaacagttacaagttgcaggtttgcaggttacaagttgtaatcgttgtgttttttacacgaaccgtttgatctcttcgctcgaaaatgttatatttgttccaacaaagatgttgttgaaacagtttcaagttacaggttcgtaggttacaagttgactagcttgctgttcaatgataagactggttttcttaacttgtaacctgtaaacttgcaacttgtaactatgtgtggtatgtttattttatt

SEQ ID NO: 640 - DNA, 2012 bp, Butyricimonas faecihominis
gggcattgagcgaggaaatctaaaatcataaattgtaaatctaaaattaagatgtttacaggtataatcgaagaaataggaaccatacggggtatcaagcggggaaaccggagcgtggtgctggaggtgcaggcaaagaaggtgttggaggatttgcacgtgggggatagtattgccacgaacggggtttgcctgaccgtgatctcttttgctaacgggagtttctgtgcagatgtgatgccggagacgatgcagcgtagcaatttaggagagctgcacgtaggggaccgggtgaatctggagagagcattgacgttgaacgggcgtttggggggacatatcgtgtcgggccatgttgacgggttggggaagattgtcgggagagagaaagacgagaatgccatttggatcatgatttcagccccggcagagctgttgcggtatatcgtggacaaaggttctatcacgattgacgggataagcctaacggtcgtggccgtgacggatacgggttttacggtttctattattcctcacacgcaggatgaaacgacgttagtgaagaaaaagattggtgacgtggtgaaccttgaaaatgacgtgattgccaaatacgtggagaagttaatgcgtccggcagccccggtagagcctaaaggcgggttgacgttggatttcttgttagcgaatggattctagggaagttaaaaggtaaaaactaaaagatataaaataaagaaaactagatatggaagaatttaaatttagtacgattgaagaggctgttgcagatttgagagccggaaagatgattatcgccgtggatgacccggatcgggagaacgagggagatttgatttgtgcggccgagtttgcgacgttggagaacgtgaacttcatggcttcttatgctaaaggattgatttgtatgccgatgagcaaggctttgaccacgaagttggggttggaacagatggttgccacgaacacggataaccattgcacggcgttcacggtgtcaatcgatcacgtggacacgaccacgggtatttccgcgttggagcgttccgtgaccgcgatgaaagcggtagaggataatgcgaaaccggaagatttccgtcgtccgggacatatgttcccgttggaggcaaagaaggggggcgtgctggagcgtatgggacacacggaggccacggtggacttgatgcgaattgccgggttgaaagagtgtggcttatgttgcgagattatgcgagaggatggaacgatgatgcgtacaccggagttgaaggagtttgctaaagcgcatggaatgaaaatgattacagtgtcggacttgattacctatcgtcggaaaacagaaattttggtggaacgggtaaccgaggctgatatgccaacaaaatacggggacttcaaagcctacgggtatgtgaacaagattaacggggaacatcatatcgctttagtgaaaggtgacgtgacagatggggaaccggtattgtgtcgggtacattcggagtgtttgacgggcgacgtgttcggttctttgcgttgtgattgcggggatcagctgaacgaggccatgcgtcggatcggagagagaggtcggggagtattgttgtacatgcgtcaggaaggccggggtatcggtttgattaataaattgaaggcttatcacctacaagacgagggaatggataccgtggaggcgaatatcgctctcgggtttaaggctgacctgcgtgaatacggtaccggggcagagatcttggcggatttgggtgtgaaaaaaatgatcttgatgacgaataacccgttaaaaattaatggtttgaccggatacggtattgaaatcgtgggacgtgagccgattgaaatgacttgtaacgagaagaacgagttttatatgtacacgaagtacaagaagatgggacacatgatccacgtgcgtcaacgggaagagatcgagaaattgaaagaaggattagaaaacaaataaatataaagac

SEQ ID NO: 641 - DNA, 1986 bp, Butyricimonas faecihominis
aatttatatcattaactatttaaagtttaaagattatggaattaccttttgcagaatcgtggaagattaaaatggtagaacccattcgtaaaagtactcgtgaagagagagaacaatggattaaagaggcacattataatgtgtttcaattacgtgcagaacacgtgtatattgacttgttgaccgattcaggaaccggttcaatgagtgatcgccaatgggcaggaatgatgttgggtgatgaaagttatgccggagcatcttctttctttaacttgaaaaacatgattagccgtttgaccggattcgattacgtgattccgactcaccaaggacgtgctgccgagaatgtacttttctcttatcttgtaaaagagggtgatatcgtaccgggtaactctcactttgacacgacgaaagggcatatcgaaggacgtaaggccatcgcttgggacgtgacaatcgacgaggcaaaagatacccagttggaagttccttttaaaggaaatcttgacccgaagaaattggaaaaagtattggcagaacacgctgataagattccgtttatcattgtgactgtaaccaataacacggctggtggacaacctgtttccatgaagaatatcaaggaagttcgtgctatcgctgataaatatggcaaacgtgtcttgttcgactcggctcgtttcgcggaaaatgcttatttcatcaaaactcgtgaagaaggttatcaggacaaaacgattaaagagatcgtgaaagaaatgttcgataacgcagatggtatgacgatgagcgcgaagaaagacgctatcgtgaatatgggtggattcatcgcaactcgtcaccaagactggtttgaaggtgctaaaggtttctgcgtgcaattcgaaggttacctgacatacggaggtatgaatggtcgtgatatgaacgctttggctatcggtttggatgaaaataccgaattcgataacttggaaactcgtatcaaacaagtagagtacttggcaaaacgtttggatgaatttggaattccttaccaacgtcctgcaggtggtcacgcgttgtttattgatgccccgaaagtgttgactcatgttccgaaagaagagttcccggctcaaacgttgaccgttgaattgtatttggaggctggtattcgcggttgcgagatcggttatatcttggctgaccgtgatccggtaactcgtgaaaatcgtttcggaggtttggatcttcttcgtttggctatcccgagaagagtgtacacgaacaaccatatggacgtgattgccgttgctttgaagaatgtatatgatcgtcgtgagcaaattactcgtggtttccaaattacttgggaagcaccgttaatgcgtcactttaccgttcaattggagcgtgctaaataaaaagaaaaggggcgaaagcccctttttgtttataaacgttatgaactatttctttaagctagctaaagctgcatcatagttaggttcttgggtaatttccggaacgagttcttcgtagatgatctttccgttctcatcaataacaacaacagaacgagctaataatccggctaaaggtccgtctatcatttctactccatatttgtcaccgaacgcatgatctctgaatgcagaaagaggaattactttgtcaattccttctgtggtacagaaacgagcgtgtgcgaaaggaaggtctttagagatagctaacacgatcgtgttgtccatttctgccgcaagtttgttgaatgtgcgtacagatgttgcgcatacgctggtgtcaagactggggaaaatgtttagaacaacacgtttacccttttcgcttgccaaggtcaattcagataaatccgtttttactaatgagaaatcgggagcgactgaaccaactgaaggtagattacctttcgtgtttatgctatttcctgcaagtgttatttttgccatagtgttttaaattttaatgtttgac

SEQ ID NO: 642 - DNA, 1985 bp, Butyricimonas faecihominis
tctctatattattccaaaatagggggtaaagaaattcaccttttgggatgctttttagaggtggaaacctgcttggtgtatttagaaagtttccagaatctcgtaaaacctgtgtttattaacatgagttttagtggtgaaaagtaatttgaataattgtacagcattattatgacgcatttgttccataccattcttgataaggagtttattcatcctctctgttatctcttccccttttaatttttccccaacttgaaattccttgagtaggagaaccctgtaagttattaatgtcgggtcagtacttaattttatcttctggctctttatgatctggttcattctctttgtatcatgcaggtgttgttcctgtaattcccttatctctttgtcctgcatcccaagacaggataattcatcgtaagtgtcttcaatcttgttctggatgtcatttttctcaattttcaccccaagctttgggagatgaaattctttccccatgaacatggtggattctgtttctcttgatttgtaaaacaaatcaatttcttttagtatttcttctttcattatttcttcattttttttgttccttttttcttttccagttttgaaattagtttcatacccatcatcatataaaccgatattgtaatattttagaatattactcatcttgtataattgttcatgcattacatggttgatcaactggaaaaccttgaaagcaatgctctggtgattgatctctcttgtgatgctgatatactggtcacattcattggcgagtaatttcaactgccttttcaaggttctagtgttcttggcaaccttgttaagttcttcaattctttgccttgttttttgcgtgattcctgtttttagataatcaaaaatagaagggaagttatatattcctttatccccttctttctggatgatggcatttgttagtatgtatgatagagtggttgtatcttctctaaatctattcatcatctgtactatattcacgaaagagtgtggatttttccccggtgcgataatcaatagataatctttccccagtagagaatatccttgggtgtaagttgtaagaatcacatctgcatcaatcctgcactggttaatcaattgtgacaagtaacatgagccatcatccccttccccaaaactttccactaccaaacctgtttcctcctcctcttttcccttgtttctagtgatcttggttttagaatttattatagctatccttttgaatccaacctcttttaacgcttttagaaccttggggagtaaagaggatttatcaagtaatgaaaccacgggtattttcttctcttttctagcgaatgaacatagttcaatgatcccacctcctaaatcttcataccttacaattctcaaatctctcttgtctggattctcttttacagccttgatcattgtcattcctttaaatatactatcatcacttgtgacaggtgtaccagagagaaatatgatcctcttgtaatattccaaggagatcataacctcttcaataacctctcttttccatccaaattctgtgactagagtgtgagcctcatcaataatcacggtctccctgctttcaaatttggggatatggtgctggatggtgatgatcaaacttgaattaaaatcttctctatgatctgctgtataatatggtatctggtattgtgctgatagttgttttgccaagttaatggtatcaacaacaaaaacagcttttatctccctctcttttagataattgagaatgtaataggatttcccaccacttgttggacaatccacgtagattttaaactcttcattaaaatccaagtcatcaagaaaccttgtttctgataacttttccttgaatgtaaactttttacattccataaaattctaatatttagttaattcttaattttccttcaacacttcgattattatttttactatat

SEQ ID NO: 643 - DNA, 1984 bp, Butyricimonas faecihominis
aaacaagaatataaacatctttattggaatgaataaaagacaagaaaccctaccaaaatgaaaaggtcatccttccatttcggtataacaaaacggaaaacaaacgaacgatacttgttatttatctcccaaaccgtattcctcgattttacggtacaaagtagttaacccgatacgcatcaaccgggcagcctccgtcttgttgccccccgtgtgttgaagaaccctccggatatgatttttctcgatattcgccatgtcgaaatcggaaaatcctcccgtttctcccgcggccggaaccggacgtcgcaattcaagcggcagatcatcctccgtcaactgcccctctcccgcgatcacgatactccgttccaccacgttacgcaattcccggacatttccatgccagccgtaacgtttcaaacattccatgtaatccggatgaatctccaaccccttcttcttcatcttcgccccgaaatattgcacgaaagcccgcgcgtacacttctatatcctccacccgttcccgcaacggcggtagcggaatacagaacacggaaagccggtaatataaatcctcccggaaatgcccgttcccgatctcttttgtcaaatcccggttcgtggctgcgatcacccgcacgtccaccttcgtgggtttcgtatctcctattttaataaattcaccagcctccaaaatacgcagcaacttcgcctgcaaatcaaacgccatttccccgatctcatccaagaatatggtgccgtgattcgcctcttcgaacaatccctttttgtccttcaaagcgcccgtgaaagaacccgctttatgtccaaacatctcgctctccagcaattccttgctgaaagccgcacaattcaccgccacgaaagacttcttggcccgttcgctattccggtgaatcgcctgcgcgaacacctctttccccgttccggtttcccccgttaatagcacggggacatccgtcacggaaaccttctttgccagcgcaatggcctcccggattgccattgaactccctagaatcgtgtcaaacgagtattcccgatccaccggaatctccgcctgactctcctgcttggcctttgccacctgatccatagcccgactgatcaacgggataatccggttattatcatcccctttcgtgagataatcaaatgccccgtttttgatcgcctgcaccccatcgggaatattcccgtgggccgtcagcatgatcacctccaccagcggctttacccgcttgatctccgcaatcaactccaccccgttcccgtccggcaaacgcacgtcacacaacaccacgtccggatcgtgcaaagctaattgctttaacccgttcttgcaggaatccgcctggaagacctcgtacccctccagccctatgatccgggataataatccccttaattgatcttcatcgtctataatcagtactttattcataaaacgccaatatgggtacgaagatacaatcattttattacattaaaaagaacacgggtttccaaaaacgacttttgcctaaaaccaatagataacattcgcctattcgtagataaaaaattaggaacttatatacgaatttgcagtaaaccaactccctcccggcttcgccgtactccctctataaacagagggagagttgaaatactcccggtcttcgggaagagtcaccagctcctcctctgttcatagaggaggtggcacaaagtgacggaggagtttgagtatgaaaacaagcattaccttagaggaacccacaaccttcggacttctcatgaatgcgttacgaacccaccatcccttcgttcgaatcctttaaaatacaaaaaagagtcagctttcgtgtgctaactctctcgtttcgtgcgacttgggcggagagggagggattcgaacccccggtacctcgcagtacaacggttttcaagaccgccgcaatcgaccactctgccac

SEQ ID NO: 644 - DNA, 1973 bp, Butyricimonas faecihominis
gatagaaattatttcgatttatccctccaatttatacaaaacacacaattagaatatgattgggatttttttgtttgactctggcttattaatgaggaaaaaagctacatatcaaggacaaatgctgccactttctgggatttataacatggtatctatgaaatgacatatatttgctcacaaacaattagcaaatatcactatgaatcagaaaagtatagaacatatatcactctattcccttgtattggtaggtactcttgttgttggggttttagctcgtcagtttgttttatccaaaggtattgacgattttagtagtagtgttgtattttttgcaacagcaattgtcttgatggctatctatgccagtttacagacaactttcaatcagtttctgctgccacgcatagaagcttttctatttcgtttctctgcttttcaaacgatgaaaaatcacaatgataccgtttctgttccggaagcccctacaatcaaagattcaaaccaagctacgcctgatgtcattgagtctgctcctgccgctgaagaaacaatttctgaaccttcagaatatgaagttatgcgaaccaattctatcgcaaaaaagaatcgtgctattcaaaccaaattggaaaaggtcattagctatacgaagcaaacaatggttgcctatatgagtgaagaggatctcaaccgtctatgtacatacgttgctgaatatagttcaggcgataccttacaaaagataacgcccgtaaaggtggattcacaacttaaaagcattgatattatgcattttggttggaacattggcaaggcttttggtataaagcgcattcacacagccacattcatcaagaatgtttttgcctatacactccgtgacttggagatctcaacgattgaacgtaaaatgtcacatacggaatctgaatgttacattaaactacaacaattaaaagagtaatatatgtcatttatcatcttccattgagtcccaataatcactatccattttcatcaccttaaaggtcatttctgtctgaagccccaatccaaaatcatatatatattctgttaattgatggccattaatcaaaataacagtaggcgaaccatttaagctatctacataatccatagctccttttgtaaaatctgaagtagtgataaaaaccccctttttagatggagttcctgctacagctcccacaaaactctgaacttcattacgtccaacattattacctaatgcatatcgtttagcttgaatagaaatatgattaaagccaagaatatcttcttttataatgccatcaatacctccatcatttgaaaattttgtaacaaatcctaagttctttacttcacctccatatcccattgcttgaagtaatctcacaactaatcgttcgaattcttggggctttttactaagtattgtcgtgagaatttctgattgaatggattgttttatattatcatacgaattatataaactttcttgaggagtcggttcattctctccggttgtttctgatgcttcttctaatgtgtctttaattttagattctttcttcggagttcgtgcgttgacagttgtcttaatatactcacttatctgttcatcagaacatgattcaagcatagacaatcctttatcactaattttatagtctcctcttttaggcttttcaactaagccagcaatgaatagataagacaaagcccaggaaatacgatctaaaaatatttctccattacctgatggataccatgcattcatctcttcatctgtcaaatgaaaatgttctgctaaaggaactctaaaatctttggctctcataacggcccccgactttagtgttttcagcgcttgtatcctaatttgatcaaattgcggtatcattttggtattcactaaattaaattgataacaaacaaagttactgctttttcctcatatattc

SEQ ID NO: 645 - DNA, 1958 bp, Butyricimonas faecihominis
gtttaaagtaatgtagaatttagagtttagaatgaaaaagattccgtgattgccgattcgatgattgggtgattaaaatcacttaatcgaaaatcattaaatcacttaatcgataggatccaaaatctaaaattaatatatcatttgttcgtccaacttctcccctttcaatgcgtcatccgaatacacgtgtaaactgtgagccgtatcgcttaaacaggtaatccggtgaatatgattgttgtatttaccagccttgccgatagcatataccccgtgaatatcgctaattgtcatctcttgaaccagacaaatcccctctttaaaaggttcaaaaacctcaaccaagaactccccatcggcaaacgtgtaaccagcaaactggggatgagcatgaatggccgtacggtttcctttcttccacgacatcacgatagcctcccaaccggatttgtccctgccaatataattccgcgtataggtctcatccgaaaagcaatcaaaagaatccaacgggtgattttgaacaaaatccagcacatacgacttgatccgttcacccacgctctcgcaaataggcccggaatgtacgatattcaacaaaccatccataaaactttcatatccggcaaccatacacggagccaagtcaaaatcttcttgcaatatcttattcatactattcttcttttttaccgcatacaaacatacacgatttccaagcttctcgcttgtgtatatatacttacttcacggcaaaaaatacgtaatatttttataattcgatgttattcgctaatttcacggtctaattgaaacagaattcgtaaaagatgaaaacaatattcgtcacgttactcgcatttacattacttcttctttcctgtattaaagacgaaaaagaggatgtcataaattacatcgaagaaaacgacaaattaccggaattcaccgtgaaaagcgcaaccggagaagaacttcatagtgaagatttatcaggaaacacaaccctgttggttttcttcgttaccacctgtggcgattgcaagcgggaactcccgaagattgacagcgtgtggaatgaactgaaagaccaacccaccttccgactcgtcaccatctcccgcggggaaacagccgaagtcgtcaacgcattctggaaagaacaaaacttcactatgccgttctaccttgacccggacaaaaaagtcttttccctttttgccaatagcaccattccccgtgtctatctcgtcaaccgggaaaacatcgtgacctggatggccgttgagcaaatggatctttccgcaaaacaactaatcgggaaaatagaacaaatcatgtgaataggatatgagtgtcagtgatgcacaaataatagctttgctacaagccggtaaaagacaaggtatgaatgcactgtttgacaggtattacaaacctttagtcgtgttcgccgatgacctactccacgatctaccggaagctgaggacacggtactggaacaattcgtgaaactatgggaaaaagaactttatgaacatatccatccaaacgctttgtcaacattccttttcacgatcgtgaaaaatgcctgcatgaaccagataaccaaaaaaggactacccacggagcaattagatttacctcattacgccatagctcaagaggaatcctatctactggatgaaaccgtcatcgaaaccgttttagctgccgtccggaaacttcctgaaaagacacaacaagttgtccaatctgttatgtgtcaaggacactcctatcaagagactgcggatgaactggaagtatccattaataccgtgaaaacattactgaaagccgggatgagagaattacgttcagaattagaagaatacaagaaaatgttcttgcttttcatgttatacccccaggattttcaataaaacaacgcttacaacacactgtttaccag

SEQ ID NO: 646 - DNA, 1957 bp, Butyricimonas faecihominis
accacaggggttggttcactccattcccgcctttctttcaatactttggtttatcctccaagtttaagcatttattattattgttagccaagtgttcgtctatttatttcgtgtacaaatctaaggtacacagggggagaatgtgctacattgttacattgtggcgctttctcgcgtccgtctctccccctgtgcaagggggagtcggtgggggtagttggaaagttaaaagttaaaagctaaaaactaaaagttaaactctaaattctaaactctaaattctacattccgaaactgtacatcccgatgttctcgtacacgacgctaaggattcccgcgagcaggattccggcgctgcatacaacgagacttatacgtgaataattgtcagagttgaatctggcgatcggttgctcgttcttgttgataaacatggcctttaccactctcaggtaatagtagagagagataatggtgttcaacagggcgatgaaaaccagcacgtaatatccttgttgtgccgcggcggcaaatatgaagaacttgctgaagaacccggcaaatggcgggattcctgccagcgagaacaaggcgatcatcatcacgaagctcaagcgtggattcgtggagtacaacccgttgtaatcatcaatcgtgatcttgccggagcgatgttccacgacagcgataaccccgaaggcggctaggttggatagcatgtacaccagcacgtaatacaccagtccggtcatacccatggccgtcccgctgatcactcccagcatgatgtacccggcttgagagatggaggaataggcgaagaatcgtttcaggttctgttgccgtatggcgaagatgttggccagcgtgatagaggctataattacccagtaaaggatggcctgccattcctgaacgagcggggcaaacactttatagagaatgaccatcagcacgaatgccgcggagcctttcgagatcaccgacaagtaggcggtgacgctggtcggcgcaccctcgtacacgtccggggtccactggtggaaaggaacgagtgataacttgaatcccagtcccacgaaaaagaacacgaaagccatcatctggagcgggctactgtttaacccggcggggatgtcctcgaaatacagcgttcccgtggtcccgtaaattaacgagatcccgtacaacgataagccggacgcgaacacggcggtaaggatgtatttggcacccgcctcggccgattgttgcttgtatttgtcaaaagcggcaagtgttgccatcggtatggatgccgtttctagcccgataaagaacatcaggaagttcccggccgaaatcatgaagtacatacctagcagcgtggccagcgtgatcatgtagaattctccccggcggataatcgtgcgctcgctggaaagccagttattggcttgcatgaacacgagcagcgtcccgatgctcaggatggatttcatgaccccacccattgccgtgctgtgatacatccccccgaaagccgtcacgtccggggcgggccagatattcagcaggatatgaatacccacgagaatacaagctatcggttgaaaatacctcaggcttttcggggtgccgaatatgtcgtaaattaagagtataacgatcaccgctaccagtgatatttcctccttcattaataagaaattagcgtaacccatttttattttagattttagattttaaattttaaattccagccgcacgaggctgacgctttttgatttcctagttttagctttaatcgcaagatcgtattccagctcctcctctgttcatagaggaggtggctgcgaagcagacggaggagttcgttgccatgtaaacgctttatttacaagaactccctcccccctccggggtactccctctataaacagagggagagttggaatactcaccgtcttcgggaaac

SEQ ID NO: 647 - DNA, 1949 bp, Butyricimonas faecihominis
cattgtatttacattaaaaaatcaatcactaaatcatctaatcttcctgttaattccgatttatactacaaatgtaatacggaattagaggaaaatggtcgcatcaatttcaaaaaatcatatataaatttttctcattccgccaaaaataaggttgcaggcagggtcagttcattcccatccatatcccgaaccgtaaccgtcttggccttaaccatcccgataaacacgtcaatattgggtatcccggggggtactttattggtcggtttaccatcaagagccgtcaccgtgtagccgggggcaatcttttcaagggcttccttaccccacaccgccgtaatcttgagttccccgttaatcacggccgtggtcacgggacgttgatccccttcccaaacggcagcaccctcgtaggctgtaaaactaaaacgtttgttcggataatccagtgtcaatttaccgagatccgtgattttaaaacaaagtaacagatagtcaatgccacctgtatataccgggattccagaaaaaactccgttcccgatatgacattctttcaattcaccccgatacaatttatccatacctacccgtcccccaagcataagcgtggtagttccctgcccctcttccacgctatcgataagcccggcagctgtccactcctcgaaacctttcaccgaaggcaaaccaaaagcccccatactacttccactatcaaatacccccggaacatcgtataactcttcctttccacgcaatttgagtgccagcaagggaaggccatcccatagtttcatcggcatccaatctccttcctctctgataaccgatttctcgatcatgatggttttcgtcttcgcatcaaatgttacgacaaaatccgaaaaagcattagctcccaagataccatcaacacctattgcacgaagccccggattattcccgggtaacacgatcgcttccaagctatccgcttttacatcgccgaagacaagcgaagaaattgtggcataagacacattcccatccatccccacgatatagttactcgtcgaacgaagaaacaatcccgcctcgctaaccaccttgtccgaaatacaggtcattcccgcccccgtgtcaaacaggaaagagtatcccctaccatttatggacacgttgacaacaggtacaccatgagaatcattataattcaagaccgaagaagttacgatactatcttgcgtagcaagcgccgcgtcaagtaacaaagggtataaacccacgactaaaaataacaatacagatttgctacattttttacttctccaaaccaagttctttgttaacatcttatttcccatatttttctttcattttttgtcacttcatatcttttacttttttctttctcatgattacttcttctatttcacaggagccaaataatctgcaggacgaatgagaaatccccacatagaacccaatttatcttgttcttcaaaacgataataacgagtttcatatatcctattcatcatccggtgatagatttttataacttcctttttcgttagtatattaaacacgttttcagacatcataagagtaccaccaacagcttttccatctctatcaaaatagacctcaaaaaccaaaaggccaaattcttctttatcttggagaattttttgtacttcttttacgctccccttactccaactaaaaatgagagaattcaattctctttccctctctttaaggagagtatcatccttcacagaaggtgctaatttttcaaagccatattgcaagaattttcccccgacataatacataaatgtactatctccccaatgtttagtcaagaccttctcaattttcacctctcgatctacttcctgtgcattcaaacaaatagagaaacataataaagcgaacaaacttataattaacttcataat

SEQ ID NO: 648 - DNA, 1942 bp, Butyricimonas faecihominis
atactatcttttttcacaaatatctattaacgttatacccaacacttcttccatttcattcactaattccttgtaattttgttcaaaacacatagaccgccaatgttcagccctttcgagattcacctctgttccgatacctttttggtagcaatcggcaaggtagtattgggctgctaggtttgcttcgttacctaatgcggcttctttcagatattggaccgcagtttctttgttctctttcactccaattccgtaatagtagcacatacctagtaagcattgtgcttcattttttactttcggttttgcatgtagtatttgcttaggcgttttgataccttgcataacctgtttaaagcaattaaccgcttcttgttctctatttttcatttttaataggcatttgcctttccataaatacccttccctcgaaatggaatctggccaattacttacttgttcaaagtatttcaatgcctcgtggtagtcggaagaagtcccgataccttgataatagcacttcccagcttgtaatgctgctggattttctcgggcggcggcgagttcttcaaaatagtctaaggcttttcccgggtctttggggcatcctatgccattaagtaaacggcaagcatatatcaaccaagcggttttgtttttataatattggtcatacggatgactttggatgtattgctccaattcggacatgggcatttgttctaattcttctctattcatgttttctgttacaaaattattcttttatgcgtaactgtcagattaagtcttgactaattcacttaaaatcaatgttcattcataactcaattttctgaatttcaatcgtacctagatcctgatccatcttaattttacaaaaacctgaattctctaaatctgtgctaactattacatttttaatttgttgcataacatcattaatactaatcgtgaaagggtatgtcacttcaactttacagctcaatttgttttgcttgagtaaagcgtcctggtattgtctccacaaagacgtgccgtatatattcgctgatatatattttttcacttcagagggggaaagatcatttgataaacgtgtaccggtaatctcaaaaacagcctctatccggtcccgtttacttataaaagtaggatcgacaagttcactttccgacaaatatattgaaccgtcatttttcttataaacgaaataaacaattttttgactctttgtttctattcggattttagcctggtaaaaattcaatagagccaaaaatgtatctattgttattgtccctttttcacaccgttgtacaactctccaatcaatcccggatgcttttcctactccataaaaagttcttaatttttcatcatccgcttgttctctcatcactctaaatgtttctctaagctgaaactcctcatttatgacttgatcattcacgattaactgtcctccaagaacccttatccagttcaatactaagttcattacagagttccttcccccttcttcaataactttaattgccgctggattatttatcccggtcattatacttacttggtttcgatttataccctgctttactcttatagaagacaatatttcaaaaaaatctttccgacttcgtatttcatccatacttataaaattctcattctaattcttgcttatttctgatatagttacataacaagggaaaagtatctcgttcatctttttagctttaacgatttcctctaaccctcttgcgatctcagcttctttatccgctttcaatttttctatttttaactcaaactctgcttgttttaacttatacttgaaagcctgatccgctgcccaatattgatatttcgggtaaacgtaaaatgagtactaacactaccaaaattaataatttccatctcatgttcattcatattt

SEQ ID NO: 649 - DNA, 1936 bp, Butyricimonas faecihominis
agtaattattaaacgatcgtttagtgagatttttatgagcttgtatgtatggtaggcctataaaaacggttctttttgggtgcaagatgtaaatgtgtaaatacaatccgttatggagttggaaatgaatgatgttaaggggttaaagcagggagatcgttcttgttttgagaatatttttaatgaatattctcctgacttgtatgttgtggcgtaccggattaccggtaataaaagtacggcagaagatatagttcaggattttttcgtgaaattgtgggtgaatagggagaagttgtctatttataaatccttccgttattattgtttctctgcaatacattatgcgtcattaaatgcgacaaggacgaaatatagggatacggaattgtcagaggaattggaggatccttcttgtgtggagtatgaaatggaacgggcagagttaagcgaaaaaattcatttggcaattaattctttgccggaaaaatgtaaagcaatttttgtggatgcctgcatcgaggaatgtagctatgttgaagtggcggaaaagtatgatatatcggtaaatacagtaaaagtacaagtaagtaaagcgtatcggattttacgggaaaaattgactaaagaacaatttcctttttttttgttgatttttctgaaatccgagtaatacttttttcaagttgatgtgacttgttaatgaaaggctatttgaatatggaagaatatagatcaaatatgaatattctgaaagaggttttacgagggaaacgtcctcatgatgacgtggagttcgtggtgtggttaaaggagtctgaggagcatcagaagtgctacgaggaggctttactacaagcagcgagcgatttgaggattaaaaaatcgtttaatcgacaattggtgtggaatcgggtgttggatgaaacccggaagaaggaacgggtacggatgttgcgacgttattttgtgcgttatgcggccgtattgttgccgtttgtgattttgtttgcttggtggttactgaagacgggagacgtggagtcaagtgtggaggttactgctaatgaggatggtattatgttgtttctttctaacggggagcgggtgaacattagtcagttcgattcgactggagtactggaaaagaacgggatgaaaattaggatgacggagaaaagggatcaaatcgtgtacgagaatcatgatgacatttccaaggaattaatttataatacattgagtgtccccgcccgtgcagaatattgtctgactctagaagatggtacaaaggtgtggttggcagcaacctcccggttaaagtatccggttaattttgtgggaacttcccgggaagtatatttggagggtgaagcgttttttgacgtggcgagggatacgtcaaaaccttttattgtgaattgtgccactttttcggtgaaggctttggggacatcttttgatgtgagttgctataatgatgatgaatttggcttggcaactcttgcctcgggaaagattgaggtagctcttggggatcagaaaaaagtattgagccccggggagcaagccttgatcaaagaacaatccttatcggtgaaagaggtgaatattttgccttatacgtcttggatggaagatcggctttacttttttaatgaaaaactcgagtcgattatgaaacggatggctcgttggtatggaattgaggtgtgttatgcggacccgggcattcgggaattacactttacagggaatgtgcccaagtataccgatattgaaaaagtatttgatatactggagtttgctacccatttggatttttctttagaaaaaggtaaagtactcatttcccgatcgaagaaataaggaatttttgagtaaataatgtgtgatattgaacgtgaaaatgttcaataaggggaatactatatac

SEQ ID NO: 650 - DNA, 1926 bp, Butyricimonas faecihominis
aattaaacctttcaatgaaatatacagaagagttagacaaagtgagttattgtttcggtctaagtattgcaagtaatcttctttcttcaggtgtgaacaccattaatacagaagcttttgttgacgctatcagaacagtctatgcaggccagatgccggaaatcaaaccggaagaggctaaccagattttgcaggactattttaacaaactgcaaaatgaaagaggtaaagctgccaaggaagccggagaacaatttttaaacgataacaagagcaaagaaggcgtggttaccctagaaagcggattacaatataaagtaatttccaccggaaacggggctattccgaaaagtagcgatactgtaaaatgccactatgaaggacgcctgattaatggtgccgtgttcgactcttccatccgccgtggcgaaccggctgaattcccggttaacggagttattgccggttgggttgaggctcttcaattaatgcccgtgggttcaaaatggcaactatacattccttctgatctagcttacggccctcacggtgcaggacaggcgatcggaccgaacgagaccttgatttttgatatcgaattattagatatagtataatttaatttacgaaaaactatgaacgcaaaaaatctaattttaggtttatctgttgctgcaatcggtttatctagctgctgcaacacttctacaaaaacgaatgtatcgctgaaaaacgaggccgatacagcaagtttctatattggttacatgtacggttctaacatcactggaaacggtattgaagacatcaacatggacgctatcatcgccggaatgaacagtgccttacagaaaaaagacgctcctgccgacatgatgcaaatgaatatgtttttacagaaatatactcaaaaagccatgatggctaaagctgaaaaagcattgaaagccggagaagaattcttggcagcaaacgctaagaaagatggtatcaaaactaccgaaagcggacttcaatacaaaattgaaaaagaaggaaccggagctatcccggcagataccagtgttgttagagttcactacaaaggaactttgattgacggaaccgagtttgactcttcatacaagagaggcgagcctaccgaatttcctgtaaaccgggtgatcaaaggttggacggaagcattacaattaatgcctgttggttctaaatggacgctttacatcccgtcaaacttggcatacggacctcaaggagccagaggtgctatcggaccgaacgaaacgttgattttcgaagttgaattaatcgacatcgttgacccgaacgctcaaaaataatttattatttgatatttaaacagctagcaagcccaaggactcttgggcttgtttctaatcagaaaaacaatgaattacgaagttaccggaaaattaatttacaaagaagctacacaaaaaatcagtgatcgtttccagaagagagaattcgtgatagaagttgaaaacgagaagaatccacagtggaacgacttcgtaaaagttcaattgatccaagaccggtgtgatctattagagactattcaattgaacgagaatattaaagtgtatttcaatttgcgtggccgcaaatgggagaacaacggacaggtttcttatttcacgaacctcgaaggttggagaattgagaaagttcaagcggaagccccgatgatgggcgccccggtaccggaatacaaggtggaagacattcctcccatgccggaagccgacgatcttcctttctaaacggaaatactagtattaaaaaaggctatctcaaaagtcattttatttcaaaaaactcctccgtcacttcgtgccacctcctctataaacagaggaggagctggtgactcttcccgaagacagggagcatttcaactct

SEQ ID NO: 651 - DNA, 1925 bp, Butyricimonas faecihominis
attaataacctatatttgtatgattattaatcgttggtttaaagatacggcatttacatggaaagtcaaataacaacaaatttctggggacaagacagcgataaagctttccgctatttatatgacaaatacgcatcaacattgcgctatttttcagctaaatatgtagatgatgatgcgaccattgaagatgtagtacaagatgcctttctcaatttgtgggaaaaaaggaacgaatttaaaacagaaagcacgataaaagcttatttgtacaaaatcgtacgtagtttctctgttgacacaattcgtcgcagaaacattgcgaatcgatatgccgaaaaaattgttctcgaaaaagaagaccaagaattctttctggaaaacatcgttgaatcagaagttttccagatgatccaaaccgtctttaacgaactctccccttcttgccgagaagtgtaccaactcagtcttcatgggaaatctcatgaagaaatttcccagttattggatatttcaataaacaccgtgaaaaagcacaagaacaatgccaatcactatatgcgggaaagattgaaacacgttctttccatacttttatacatctaaattaaaatttcatgttatcaaggaaactatagttctttcactctatcttcattctttactccccgaccacttttctttacacgatcacacaagcgtccaaaattatagactagggtaaacgacacccaccgacctcgccattgttcatctttgtggtagtaaaacgagtctgtttctttcacgttttccacattgatatgtttccataaaaacttgtccacatcaacgaggaaagatagccttgaggtaaaagcatattctcctctcaaagtagctgtcgtgagatattcaaattttgtatgttgcacagatgttgacataggacgaatattgccaataattccaatagtggcctttttgaataatgtgacataaactcctgcagctgatttaaaattccaaagtggaaaattacttctagcgatagaataatacgtatattttgcctctcctgtacaccatatttgaagtttatcagggattttgtattcaaagttcatattaaaagaaagcatttccgaacgattcatattcccgtaagtagtgacaagcactcctgtttcattcgtgtagtcataaggatatatggcattacctgaatgtttatactttgctgaaaaagctaaactcgtcttttctgtataaaagcgataactcatcgagagcaactgggatatttccggttctaaatcgggattaccaactttccaatgtgaaggatcagaacgatctacaaaaggattcagataataaatatccgggcggaaagaaggtactgaatataatattgaaaacgtagatttccgacttaataaaaatatagctgaagcactgggcgttacattaaagaaattctttcgtaccttttcgctcttcctactaaattgcatattattcattgttttctcaaaactcacttctgcccttaaactcattttgattgtagaaaaaaaataacttgcccgaaatgccgaaacatattgatcataattcaattcctcatcactgcgatactgtctggcaacaagtttagccgtcaggaaatatgaatgtttctcatttattggattcgtaaaatccactcctgttgtgtgttccgttaaacgcaagctattcttaaatattcccctagaatcctctatccccaacatccctgttaactcctgtccatactgttttttcccttgattattttccacgccatacgtggcagtaaaaagcctcccttctttattccggaacgacttctgataattaatttttccattccaccgctcctctctgttgatatttctattttcaaaggaataaatttgtac

SEQ ID NO: 652 - DNA, 1920 bp, Butyricimonas faecihominis
aatttatattcgtgatatttttgatattaggattaaacgctgggtgtcatgaagtaaccgtgggatatttatggttggaagatcccggttataatccagacacactactcgtgaaacaagaaagttcgttaaatatttccgctccctcttggggaatatggcctaatcccacgtgggataatatgatagaatctggctatactccagaacaattggaagaatggggaatacaacctacattcgaaggtatggggggcgaaggagaagactattatcgtaacaaatgggatcaaccctatgtaagtactgctatagaaggaattgagggtacagaccaaatctatgtttcagtaaaacaaatcacgacagatacgggagatgcccaaaaattgaaagattgtttaatggtttggggagatggcaggattcaagttcctttacatcataacgtacctgcaggacattatttaatttcattaaacttcaaaaacgagggatattctaaagacgtgaacgattgttttactattatcgtgaaataatccttcaagtgtgtgtgtcaagaataggtggaaattctccacctattctcttttatatctacatcacaaactcgtcaaataacttatcaaaagtaacatccggatcagtcagaaagccgggatgcggacgagaggtttgaattatcgtgctacgaacggccgtcagccaacggaaacgctccggaatatccaatccggcaatcggtccgccatcacgggaaccggaacaaattcgatcgaaaatttgcaggttcacccgaatctcctctatatcgatttccggaaatagcatccttaatttttcctcgtgaagcacgtacttcgcccgcagaaattttttccgcttggagaacaaaatgatccccacgttaataaattcttcccgttccacccgcgggacaacccggataacggcatattcatacaagtatctctctggcatgttgtgcttcttttataaatatttccgaatgtgcaacccgttccgttaaaaaacgaacatacgtctcccgtatttcttgatttgtaatacccagatcatcccaatttagccaatcctccggtatcaacgccacgacttcccttatcctttccggggtcaatcgggttttcaatccggcatcgacttctgccaattgacttgcccgaggtaataaaacatgattctttacttctgcaaaaggactcaaagcgtgtttctgccaattcgtccaagaataatgaaaatagagtgacgaaccgtgatctatcaaccatagttccttgtgccacatcaacaggttcgtgttacgaaccgtgcgatcaatattcgtcagtaaagcatccaaccaaacgattttcgaggccagttccgcatcaatcacgtttaccgtgggatcaaatgcaagagccccggataaaaagtgcaacccgagatttaatccccggctcgctttcaacaaatcctgtatttcctcatctccctccgcctgaccgaaagcctcatccagttgtagaaaaaccaactccggtactcgtaatcccaagacacgagcaatctcccctccgatcagttcggctatcagagccttcgtgccatgcccggcaccccggaatttcaccacgtacttgaatccatcctccgcctccgccaatgccggtaatgaaccgccctctcgtaatggcatgatgtatctcgtcacattttctgttcgtaattccatttctatctcctttttactcgaacaaagataatcataaaatcacaacacgctatctacatctcatgggaatacacccggggaaatccaattcgttcgacgaatggaagaattacgtccccattcatgcgacacgtccaaccgttaataagccctgtttattccccattaagtgatat

SEQ ID NO: 653 - DNA, 1917 bp, Butyricimonas faecihominis
gacttgggtaaccaatatagtgcttatagttatttgttaaattataattacgagcaggttgtgtctaaagctctgattgatgctgtttggaataaaatgtacgagggtattgctaatgttaatactttgattcaatattccgatttgaaacgggaagtattgggtgattattatggagtagtgcgtggagaggctttggctttgagagcatatatgcattttgatttattgcgtttatttgctccgtatgattttagcgcagaagctaaggtggccatcccttacgtgttggaggcgaaaccggcgatcgcacctcaattgactccaaccaagtttgtggaatatgccttgaaagacgtggaagctgctttggaattgttgaaatcggatcctattcttaccggagaggatgtgtctggtgtggataatgggtatttagctaatcggaatttccatttgaattattatgccgtgttgggattaaaagctcgtatttgtttgtacgctaaggatgtaacggcggcttatggtgcagctaatgaggttattttagctcaacagcagaaaggattatttccttgggtaaaaacggcagatattacgacgacagaagcaaacttacgggatagaacgttctcttccgagcatctttttgcttttaatacgacgaagttagaagagtatataaaaggatattttagggaagcatcgcttcctcttatggagcgcttgatgccgggagaactttacgaggcggatgattatcgtacggctctttacgagacttatagcgggttcgctaacgtgttgacgaaattctggcaaatggataaggcctacgttcaaggacaaggttacgtgaccccgaaacggaatcgaatgccagctatccggattgccgagatgtattacattgccgcagaggcattgaaggagtctaatatcggagaggcattggaaatgttgaatactcttcgtgttcatcgcggattgatgaaattggaaaatctggataaagatcaattacaggaagaattggggcgagagtattatcgtgaatttataggtgaaggtcaagtatttttctaccataagcgtatgaacacaagtataattgccaccgcaaatgctgtttatgtacttccgatgccagatgatgagattgatttaggtcagcgtgaacaataaagatcagaactatgaaaaggatattaattacgagtatattgggttttcttttttcgggattattcatgtcctgtcaagaagatgaaattaaattttacacggggcctgttgctattaatatgactgtggatggggatgggacttttgtaagtaacgagacgaacgaagagaaaacattcaaaatagagttcgccgtgcaaggagaggtctccgatcgggatcgtgtgttaaagcttgctttcggaaaaggacatacggcggtggccgggactaatttcgatatgccgatggaggtgattattgaagcggggagattggatacgatcattgaatgtaaagcctatcgtgaggggttgacgatggaaccgctgatgtttgatttggtggtggatccgagtggggattttgttggaggggtgaatgatgagttgttggtaaagttaatgctcggttatcccacgaaatggattgatccttccggttgggccgctgaatattggctagggaaatgtactcaagcaaaatatgcattcgtttttgaacaactgggtacattggatctagggccttaccaaggtagttttggttctggttatatggatttaatgaataagtttaacaagattctggaaacagatcctcggcttgatgatgatgggaaagtgatgaaatttggtccgggttattgattaatcatgaaaaacgaatagtatgaatacatatagatac

SEQ ID NO: 654 - DNA, 1903 bp, Butyricimonas faecihominis
gtttagatacaatatattaaatgagttggcaggcaccggaaatgagaacacttccaattcattgaatgcgaatattagtttgaatttggatattttacgtggtttgaaatatgagatgtcaattggttatagctacacttcctctcacggacagtcttgggcaacagaaagaacttattatattacggctaaacgtggctacgaattcgggcaatatggtgcgaatgatgcagaatataaaaagagtgggttgccccatggaggtgaattgaatatgcaggattcgcgtaatgagaattatacttggagaaaccagttatcatacgtgaaaaattttggtagacacttgttgacagccacggtaggtcaggaggccagtagctctaaatatgacggttttactggtactttttggggatatttaccggaacgtggaaatacgattaaaaatcccccattgaataccgaaaataatggatatctttcagcgaatacaacttacgcacagccttcgaagtcgattattaataacaaggcgaataaattgtctttttatggtgcatttacgtacactttcgatgagcgttatgtatttaacgctagtatacgatcagatgcatccaatcgtttcgggcaagataaaagcgctcgctttttaccggtgtggtcgttcgggttgcgttggaatatgggacgggaacatttcttagaaggacaagatttcttgaacgagtgtagtttccgattgacttatggataccaagggaatgctaatgaggctgcctctcccgatttgatcgctagaattgcaggcgataatgagggaggtattgttatgggtgaatatgcattgaatattaagagcttgcctaatccgaaattaaaatgggaaaaaacggcaacattgaatgctggggttgattttgtgttttggaaaaataagattaacggatcatttgagtattattacaaaaagactacagatgcagttattaacaaggaggtgggaatggaaaatggagtgacgagtatgccaatgaatggtggttcgttggagaattatggatgggaattgagttttagtttcgctccagtgcgtacgaataatttcatttggacattagggttgaatacttccaagaactataataaggtgacgagtaaattagagtccaacaagaactggacccaagccacgactggaaacgtgaacaaagaaggatatgctgtgtccagtttttgggcatttgaatttgacgggttgaatccagaggatggtacgcctcgtttcaacttaccgggagtcgatactcctgatgctaaaacagatgccacgatatatatgaaacacatgggtaaattggatcccgactttacttccggtttgagtatgggttttcgtttcaaggatctgtcactttcctcgtcgttctatctttccgtgggtgggaagaaatttttagcaccaatgtatgctgcagagatgtataatgatactccgaacgaatataataatttgccaaaagatttggtgaaacgttggcgtaaaccgggggatgaaaattatacgaatataccatctttacctcagaaaggggaaaaggggataactttaccgaattcgagtgaatattttgcgaaagtatataattacgcagatattcgggtggtaaatgcttcttacttgcgttgtaacaatatttcattgtcctacaacttgtccaagggatggatcaagaagtttgcccaaaatatgagcttctcgttcaatgtgtccaatcctttcataatcgtgagcagtgagtttaagggcagagaccccgaggtggcaaccggatcgcaaccgataacacggaactattcatttagtgtaaacttgagtttctaatgattagactaataa

SEQ ID NO: 655 - DNA, 1901 bp, Butyricimonas faecihominis
gaataattttcgtatgggaatttttaataaaataaaaccgactacatggatttatctttgcctcgcaatcatcgggtgcgtattcattgtgaattatctggaaatatttgatttcaaaccggatctgaacggggataacgtttactattatgccctaggaagagccattgctgccgggaagggctacacgaacatcatgtttctggaagaaacccctcattcccatttccctccgggttaccccttgtttaacgccggaattttacttttcacccattcctacacggctctaaaaatagcaaacggcatcttattcgggttgtccatcctcatcctttttttcctcctaaaaagaatttcggggaatttattcgtcgccctgtcaacctgcctgttatgctgtatgcaacaggcattactacgttactccacgattgtcatgagcgaaatgctatttaccttcctcacgctgggagtcctgtacctgatctcgctgatcgatatggaccacctgttctataaaaagcgcccccgttcccagatcatttatttcattctgatgattatcgcgctgaattacatctattttgtccggaccatggggacatccatcattctggcaataataatttacctcggtattctttgtacccaaaaaatcctcacgttcctcaaaagcaagcgtaaaaacgacgagataaccatacaggccgacaacaaacgggtcctgttcagccacctcattatcttatgcgtggtcatcgcatcctttgcaggggcaaaaacagcttgggacatacggaataaaagcattggagtcacgagtagtgactatctccatgatttcaaaaagaaacccaagggtgaaaccatggtcactttctcggactggacagaacgtatcgaaaacaacctagtcagctacgtgggcaaatggattcccaccgccatcatttccgatgatcccggattcgatgaaaaagtaaccacttcaggactgatcgagggaatttgtatccttatcgtcgtcctgatcggattgatcgcactgaaaaaaatgcaattactcctgttcctgtacatcggcatcacgatggccgtactcatgatctggccggagcaatacgccggacaccgctattttatcggagttattccccttttcatattcttgttcctgaacggttgtctcgaaatcatgaacacgatcaccaaaaaactttcatttggtaaataccaacacgtgattcctgcaggaggcctgatcgtgttcctcgtgttcttcatgttcccgcactacgcgaaagccttgaaaccgcaacaaaattttgccacatacaagcaatggaatgaaaaaattgccgatgccgccttcgtggaatacatctatgctgtcaactggtgtaaaaagaatctgcccgaagaagcccgcatcgcctgccggaaaccggaacttttttacctcttttcaggcggcagaaaatcgacgtcttttccccaatatgccaaagaggacgacctattcaaacgattccaagaacaaaaaatctctcacgtgatcatcgaccgctggttccgccacgggtatgtcaccgtgtaccccatggtcaaaaaatatccggattatttcagaccgctcatccagatcgggcagaacacgaaacagcaacttcccacgttaattttccaattcctgccgggaggccaaccacaagttccgtagtttagttcaaagaaaaacgaatcatacttctcatgtcgggtgaaaaatccgacatgagaaggtatattacaggacaacaaaccgttgacccgaaaattttataccataatccattatcatatcctcatcaataacggacctctttcgtataaagcgctattagaacgctattaaatcc

SEQ ID NO: 656 - DNA, 1900 bp, Butyricimonas faecihominis
atctttttcattctaaattttaaattttaaactttttgttatggatgtattttcaagttctaattcatctttttcaattgtcaatcaccggttaatgggtggtggggtgattcatctagaatgcccgaagaatagacggggactaggagagccggatatgattattttacattacacggcaggtatggatgccatgtcttcagcaaaattcttggtgaggccggacgtgaaggcatcggctcacgtggtgatcgggcgggacgggcaggtgatacaaatggtgccgtttagtatcgaggcgtggcatgccgggaagagtagttacgggggaaggaacgagctgaatcattactctatcgggatcgagctggataacctggggcagttgcgactggaaggggggaagttcgtggcggaatgtggaaaggaggttcccgtgggggaggtgtacacggaagattcaggagaggagccgacgtactggcatgattacacgaacgtgcagatgcgggtgttgaacgaggtgtgtggcttgctggtggatacttatcccatcggggatatcgtgggacattcggacgtgacgtcgaggaaagttgatccgggaccggcgttgagggtggcggactggattcagtattattgattttagattttagattttagattgaactccctcccggcttcgccgtactccctctataaacagagggagagttggaatactcgctgtttttgggaaacttttcattctaaattttaaattctacattctaaattccattcttcgtgtagggcccatgcggggagtgcgggatcattttaaattttctgatttattcatttttaaattttattattatggcaaaatttgattcttatttattgggtaaagtatcgaaaacccttggtaacgtgacgatgtgttacatgaacaaacagaatatcgctagggcgaggatattctcaagaaaggataagccgacttcggagatgttggaccagcgagcccgtatgaaggtgttgatcgagttgtcccgtttcttgttgccggttgtgcagaaaggatttgtgggaattgggaacggaacgacttcgaatgctttcgttgcgaaaaatatgaaggcggtagacgtggacgagaaacacgtggcaacgatagattacgaacggttgaaaatggctactggagttcaggatgttccggaagtctcggtcacgtattccgcggaaaataaaatgtattctttcgaacaggagatgcagacggaggagaacgggttcgctttggttgacgatcgggtgtatgccgtggtgttcgagagcgtgttgatgcgggtgaaattgatctcgttaagaagtcggggggagaatggaaataccagtgtggcacttccgaaaaattggaaccacgcaaacgtgaagatctattgttttgcaacctcgaagaacgggaaaagtatttcgcctagccagtatctcacggttgagtgattttaaggttatgatgagcttatactttttcacgggaatatttttcacactgagtttgaatgcttttttcacgcagttggcaaatgattttgtcgcgggtgtgttaagcatcgtggggggagtgatcagctcggtcgtggtggcttggtgcaaacgtcgatgggaacaacattgatgcggatggggtggcagagattctttgccactccttatcgtttataacgcggcttcgttgtgctatgaattttgtctcttttatggtttgagtggaacccttgacgatggaattcgtatctgatacggggatattttcaagtgtcctattgtataatttttatttgttattgtcaatgttttttaatatcttgacgccgtttttctggattactggcacatttattgacac

SEQ ID NO: 657 - DNA, 1862 bp, Butyricimonas faecihominis
atccttaatacctgtaatataatttctgttcagagagttattgacaattgtcaatcccatttctcgcagagcccctgttcctccatccacgctggcacttcctccaacacacagaatcaaattgttcgctccttgcgagagggcgtgattgattaaaacaccgaatcctgccgtgttcgtgttcaagatgtcatattcctctcgtttcaaatgtttcagaccacaagcttcggctaattcaatgatagccgtgttgtcttttaagtaatacgaggcaaaatgctcacgtcccaaggcatctaccgttttcgtcttgatagggtgtgcatgaaggtaatgtgccacaattcgggctgttccatcaccgccatctcctaatggaagagagatcgtatgaaatccacattcctctaattcagaggctaggattcgacaaaactcgaaagcatccagacttcccttgaatgagttaggagctagaagaatattacggttgtttatgaggttcatggttagatattgtcaggatgcacgggatgtgcttggactcctttttcattggccagcaattttttcccgtcttcgaaagccttgcagtaatcaggatcaaacagatttctgtccggccattcttttacccgatccatggcacgagccatcataccttcaatcttatgaggaaaacgaggtccggtccaattgctcgtgtttgtgataaatgcccaacagaacccgtcccgttgacgtttcaacatggcactggttcccgccaaagtaccggaacgccaccaatcaccttgattgttcgtgttcatccaaccaagaggcaaagcatttttcacacatttcgtcatggtctccacgctttcttttgtcaatatatccggatatgaatcgtcagcgtctatggcagaaaggaaacgtaataattccgtcggggaagctacccagccaccggcaccgtaaagagcctcgatattgtttcccccgttactgcgatatactagcgtgtcccgcccatcgcatgaacggatcaggtctgcgtctgattgttcgtaatacctgacctcgttgaaatatcggtctttatccagattatgggccaagtgcatatcgtaacacccggcaggaatgagtatgctgtcttgaataaattcttcgtagttttttcctgaaactttttctattacccttgataatattccataacccacgtttgaataacatgtgcttgtccccggtgtgaagcctaaacgtcgagataaaacaaatttaatgatggtattcaagtcggctggtgccggaacattcattttttctgcgatatctaccgggcagaacatggggtctcctgcacgattggtgaatcccccctgatggcgtagaagattttccacggtgatattattcacccgtttatcttttatcggggcataaagtgtcgtgtcacttaaaataccttcctcgccaaatactttatcatccaaggatagaatcccgttttcaactaatttcatgattcctgccgccgtgattagtttggaaaccgaggcaattcggaagatgtggttcacatcggttttcacctcattttcttcgtcggcatacccatatcccttgctataaatcagtttcccatctttcatgatcgcgagggaagccccttttatttcccactgattcataaaacgttcaatcgtttgatctaaacgcttggtttcaactagatcagaatattcattcgtgaataaatcatgtaccgctacggcaagcgtgtcttggggaatagaatctttttcaacctgaatttctttcgtgaaagaattccaaggtctgaaactgataactaaaaagaatagtat

SEQ ID NO: 658 - DNA, 1862 bp, Butyricimonas faecihominis
ataataaggtatatcacacaaacaagtgtcgtttttcctctctgaaaacagagaaaaacggcacttgctttcatttataacatagtttcctatttcgggcgtaccctctgagaactgaaaaagtaacccctaaagtaacccctaacttaaagaagtagtaacccctaacagtaaccccaatagtaacccctaaccaaataaaaccaaccgtaggggcataaaaaaagggagccataagctccccaatcagcattcaaagaaataacgcctacaagcctttctaacggcgctattatatcgttctaaccattcccttactaccacccgagatgagcgtagattgcttaattatagcctttttcgtgcatattgtgccgttaccagacagcccggcatgaagcaggtaattcttggttgcccccacctgatctgccgtcagaaccgtataaacagccgatatactgctgaaataccaatctttctgcttcgtcccgtctattttatgcagcaaatgcacatgaatcacttttgccatattcgtttctattatgctgcaaatataccaaataatacttatttggaagaattttaaggcaacatctttaaaaataggcacaaaaaaacggccacacagccgttcacaccatcatataacaaaatccatcaacccagccataaaacggccacacagccgaaaataaaacccttccaggccgttttagccccatctgcaagcccgatgtaaagcaatcccccgaatatccgaagaaaagcccctcaaacgtaaagcagatgtaagccatgtaaagagaaaaaccgcttcgaaatattcagcccattttcccgatcatgcctaaaccctttggttttcaaaacctttcgcccatttttcccgaccattgaaaaaaccgcttcgttctatgccccatatatggcagtattcttctatggataataataaagaaatatctcatgttggcgctcctgcccgtgctgcgatattagagttgtctggaggggaacgccattatttgggtggtagtgagatcgaattcaaagagcaggatggtatgcagttggcagtcagtgagggtaaagttgtgtatgataagaagacgggggaggacgtggagaaagaggaggaagtacttgtttttaataaaatcacggtaccgcgaggtgccgggttatatcgaattttgcttagtgatggtagcgtgatatggttaaattcagatagtcgcttggagtatccggaaaagtttgccttagaagaacgaagggttcgtatcagcggagaggcgttttttgatgttgcccgggatacgatgcgtccgtttgttgttgagacagctttacaatctgtttctgttttggggacgaagtttaacgtatctgcttatccatcggaaccggttttgacaacgctagcttccgggaaagtaaaagtgatgtctgttagtgaaatggattcggttgtcctgttaccgggggaacaatctgttctaagtgtgaatgcagataacttatccgtgcgtcaagtgaaaattagtgatgttgtttcttggaaagacgggatcattaatattgaaaacatgagtttgagagagatattgaaagtcgtgtctcgtgcttatgatgtggattttaatacagaattattaccagctgatgatattattttgcgaggaagcatttcaagcgatgaaagtctgggggtgtttcttgctgtgctaagtaaagtagcagatgtgaaatttaaaatgaaaactgatggaaaaatagaagtccaaaaaattaattaaaaaaagggagagaattcaaggaattctcccgccccaagtttgcgacgtctgttggcg

SEQ ID NO: 659 - DNA, 1861 bp, Butyricimonas faecihominis
atagtatataatacaggaaacgggttaacaactttactaagaatccggccactcccgacacccattccaaccatgatataccctcaatccactccatcatttttgcctcgatcacaccggaaagtccgtcccccaaataccccacggcataattaccgaccacgaacaacacgatgacaatcaccaccgggaaaagcataaaataccacaacttactagaaaacaataaacttatcgccttcccgtatgctcgtattcctctcgaaaaatctcgtgcaaaacccataaacagtgcattaaatttcctgtaaatttaaacattttttcgcaaacatcaaggcaacgacgttgccttagaattctttataaactttacagaccttatgaactttacgaactattttgtactttcgcgtgagaaagtaaattccttgatttaacaataacgtgaaaaacaaataacatatgcaagcattaacagcaatttcgccgattgacggcagatacagggacaaagtagatagcttggcaaactacttttccgagagtgccctgattcgttacagggtaatggtagaggttgaatacttcatcgctctctgcgagttaccgttaccacaattacgaagattcgaccacgcgctgtttgacaacttgaaagaaatatacctggactttaccgtcgaggatgcccaaaagatcaaagacatcgagaaagtaaccaaccacgacgtgaaagccgtggaatacttcatcaaggaacggttcgacgcactgaatctccacgagtacaaagaatttatccacttcgggttgacttcacaagatatcaacaacacggcagtaccctgttctttccgggatgccattcacgacgtttactaccccgtgattgacgaactgatcgccaaactcgaagaattggccgaagagtggaaagatgtacccatgctggcaaaaacccacgggcaaccggcatccccgacccgattgggtaaagagatccgtgtattcgtctatcgtctgaccaaacaactggaactactgaaaaaagtagcttgttccggtaaattcggaggtgccaccgggaacttcaacgcccacaacgtggcttacccggagatcgactggacggcatttgccaacaagttccttaccgaaaaactgaaaatagaacgagaacaatacaccacccaaatatccaactacgacaactttgccgccgtgttcgacaacctgcgccgcatcaacaacatcgtggtggatttggatcgtgacttctggacgtatatctccatggcctacttcaaacagaaaatcaaggccggagaagttggctcgtcagctatgccccacaaggtaaacccgatcgacttcgagaactcggaaggtaacctagggattgctaatgccgtgcttgaccacctcagcaacaaattgccaatctcccgtctgcaacgtgaccttacggattccaccgtcttacgtaacatcggggtacccttggcccacacgatcatcgccttcaaatccacgctgaaaggattaaacaaactgatcatcaacaaaccggccatcgaggcagacctagaggataactgggccgtggtagccgaggcgatccagaccatacttcgccgcgaagcttaccccaacccgtacgaggcgttaaaagcccttacccgtaccaacagcaaggtaacccaagcctccatcgccgagttcatcgacacccttgacgtatctgccgagctgaaagaacaactcaaacaaatcagcccgtcaaactacacgggaaaactataaaacaattgaaaattgaaaatggagaattgaaaatgtattctattctcattttcaa

SEQ ID NO: 660 - DNA, 1820 bp, Butyricimonas faecihominis
attcaaataaacacattaacgcacattcattcgaaatttccggtaaggtaaataaatacccagccatttcatcatggctataattttatgtttccccgtcgggttcacaggcaagtctattgttttacctgcaaaatgattaatcacttctctaaatacccgacaagactcttttacccgatactttgcatcggcactcagcaacgttgtcaacattattcgggagttaaaaggtgagcaaacttccgaagcaatccaacattcctgttttgactgtgcagtcgaaggtccccaatccaactcccaaaacaacatatccagcgcatttaaatgatttgctttaaaaagaggacgattcgtatcataccatgcttgcaattcccgtacggcataaggatagtttctacactccatcaacgccgcaagttcccttcccgatacattctctgtataattgtagtaactacgggcaatctctcctaaattaccatttaacattatcgcatccttaaaataagttccgttccccgaaagaatcattgccgccgtccgatctctggcataatcaacactattcttatacacttctttcaaaacaggatcgacctctggcgaataccggaacacttgaaatgatttcccaaccaattctgtcaactttttaggaatgaccagatccgggtggttttctttaaaagaaggatgtttataaataaaatatgtacactctttcaaaccaagactagcggcaaaaaccattcggctatcaaagccagccgtcacggggatcactacttttttataacgcttcgctatcgcctcgatatatcctttaaacatcggaatcacctgttccacaacattctgcaaggcttgtctctgaataggccgtgccggaaaaaaacgcacgactttacgtgtagtcacatccagataggaatttgccattaaacgaaatattccttgtttccaagtcttgctggagatcgcatataatcgatatttataaaccgatgaattaaaaaatacttttgcctccgggtctacaacatcttccaaggggaaaaaatgttctattaatttcacttgagaggcaaaaacgtcaaaagaatccttataataaaggattcgctgcgcacaagcatccggtataatttttacccccgcggcatctttacagagtacaataaaatgaccacaatattgatccagttgccgcatcaaatcttccatgtcaacagattccgatagtccctttacaatatcttcatttgtatatccagtattccgatagtcaaacagataccccaatacggccacagacaaatgtttcccatcctgatgtacataatccagattcggatgtacgtaaacatgataattatcaaacaaaaactgtttccacccgtctagagccaattctttctctgaaattatatactgcctgttaaaaagctctgtttccatcatttgtccattttaagattcttacaaatataattaatttcacccaacatgaaaaatcgtcctatgactctcggtatttaacatttttcacattctctttcaaacgcctcagatcagaccatttcttccaagcacctttcaagttattccactcatccttatcgtaaaaatgccatttatacaacaaaaacgggtacccggccaaaataaccaatttcaccaatacacttatcccaatagctgtttcattaaataatataccgatcaggtataatattgttcccacaacaagcaccttccccactttcgacaattcatagggaatagggtaataccgttgagcaaatatataa

SEQ ID NO: 661 - DNA, 1816 bp, Butyricimonas faecihominis
ttgttattttaatcttctattaataaaatctttaatcacgaccatagcatccttaaaatttaatttaaggaagtgggttgctatatctcttcggttttctttcttatatttccttgtgtatgcaaaaacctgtttataataaatctcgttctcattcgaaagagtaataaacttattcaaatcttccatacggtaacccgatggaacatctttcactatctctggaaaataatcatccccaattttaagatactcataagaaattatcgcatcacccgacaaatcaacttgaagtataattgaatattttgtgggttcccaagccatattaaaaacacaattacctaatgaataaaaaatatatttaccatgataaatttcatacccttgaaggatgtgtggatgcattcccacgattaaatccgctccacaatcaaccataaaacgggcaaaagccttttgatccaaataaggataatttataaattcatttccccaatgaacaaaaacgattctaaaatcacaatcagccaatttagctaattcactttggatctcgacgtattctggtaaacaccagtataatggacgttgagagaaattttcaggacgttgactaaaagccattattccaactttttttccttcatgaaaaaaagttgtacttttcctttctagactaccaacatactgaacaccatgatcacccaaataccataacatttcacgataagcactttctccatgttgcatcacgtgattgtttgcaaccccataaagatcaagatgtttcacacacaccaagtctctaggagaaattagaaactgcttagcatataccccccgtttatcggaagtatccgcacaaacacattccaaattaccgatccaaaaatccgtcttttttctatacaattttacaaatggatcgaaacctttcttaatggcagaaccaacaccaaatcccatatcaaaaaagccatcagaaaaatttatatctcccaaaatttttaacatcttacagatatttagaaagaacttgccaaccgttagtttcagtaaaacgcaacgcttcttttttagcattacatttcatcactgaaagtttctttctattgttatataattccatgattcttgcgtcaaattctttttgacaattatcaaatctcacaataaaaccagtttctccatccttgataaattcacgagcatgtttccactcggttgcaattacaggaagattcgcaatataggcatcaattattgttccaggcaatccttccgtatagtatcttgtcggaaatagcatcaagtcatagtttactaaggttcgagatattatctcttgtgacaaaaggcctccataagtcacaatatcaggaaattgacttacacaaaacataaaatcttccttatcgtcactttcaaccattccataaaaagtaattgtaatgtctaatccgttctctcgaacatattgagcaaaattaaaaacagttggatatcccttttttttattgattcttgataaaaacactaacttcaatgtcctcgtgttattcctatttacaatagagatatctatttccctaaaatttgtaaggaccaccgtgttattaaaaccaaattctaactttagatcattatctaccttttccatctccggcataaatgcctttatctttttactcaagcttaattgaaaaggatgagaagcaaatcgttcatcacctttaaaatactccacctgccatcctccaatgcatatatgaattatctcataaccaaaaatttttgacaagtaatatacaac

SEQ ID NO: 662 - DNA, 1772 bp, Butyricimonas faecihominis
agcctacatcgtgggcgtacttaaattgttcgggggactatgaaaattccgccggaataatttcaggcatcttttggcaacacatcacgttgctctcttttaagcaaaacaaacaacttaaatcaataatcttttaattatgcaaaaacaactattattaggtgttgaagctattgcacaaggtgctatagacggaggtatatccggcgtgttcgcatacccgggaaccccttcaacagagatcacggaatacattcaggaatcgaaacaggctatcgcccgtaacgttcaccggatgtggtctgcaaacgaaaaaactgccatggaaaccgcattgggaatgtcctatgcgggaaaaagagccttggtatgtatgaaacacgtgggaatgaacgtggctgcagactgtttcatgaacgctgcaattaccggggccaacggaggtatggttgttatcgctgccgatgacccatccatgcactcttctcagaacgagcaggattcacgcgtgtacggtaaatttgccttaattccgatcatggaaccctctaaccaacaagaggcatacgacatgacccgctacgcattcgacctgtcagagcaaatgggaactcccgtgttattaagaatcacgactcgtctggcacactctcgttccggtgttgaaccaagagaggctaaagccgaaaatgaaatgcgtttaccggaagacaaacgtcaattcgtgttacttcccgctatcgctaaaaaaagatataaattattactagagaaacaaaccgctttcgaagaggcatctgataactcttctttcaaccaatacattgacggggctgacaaatcaatgggtatcgtcgcttgcggtatcggttacaactacctgatggaagtgttcggtggaaactgtccttacccggtagtcaaagtaagccaatatcctcttccgagaaagatgatcaccaagttggcagaaagcactgaaaaattgctcgttttagaagaaggctacccgatcattgaagaagcattgaaaggttaccttgaaaaagaatgtgtactcggacgtttggacggcacgctccccagagacggagagttgaatccggatcacgtggcgaaagcattcggattaccttctatcgaaggatcgcctgtaccggaaatcgtggcacctcgtccaccagccctttgcgtgggatgtagccacagagacgtgtacaccgcattgaatgcagttgttgccgaatacccgaatgcacgtgtattctctgacatcggttgttatactttaggagcccttcctccattccaagcgatcaactcttgcgtggacatgggagcatccatcaccatggcaaaaggtgctgctgacgctggattatacccggctgtatccgttatcggagactccacgttcactcactccggcatgaccgggttactggatgctgtaaacgaaaaagccaatatcacgattatcatttccgacaatgaatccatctccatgaccggaggtcaggaatcttcagcattaggacacttggaatctatctgtcgcggtattggtgttgaaccggaacatatccgtgttctacttcccgtaccgaaaaatcacgatgaattatgcaagatcatccgtgacgagatcgaatacaagggtgtatccgtgatcatcccgagaagagtttgtatccagaaagctgcaagagacgctaagaaaaagaaaaaataaattgattcaatgatcaatttaaaatctaaaacttaaaatt

SEQ ID NO: 663 - DNA, 1771 bp, Butyricimonas faecihominis
cgtttacacgctgtcagcaaagttaataattgtattcaacatcatatcagattcttacaaattattcttcaagttttaatgttgcctgttctactacacgcgccctttataaataatcgcaataggtttatccgcaatattgtggtattgatttaccaagacagaagtctttacatcgtagatatacaaatgccctttcagagcttccgtttcatctttttcgtacaaaccaacatatagtaaggttccatccgtgttcatcgacaaactggtgatctccattccctcaggtatcgaaataacaggggttgttgccaaccgattcttcaaatcccaataatatataccatcctcacacgtgtaatacagacaatcacatgatttacttccggcaagcaacgaattccggttaactttcagtgaaaccggactatcatagaattgaagaatcgtcgggtttcctaagctgaaagttgtctgggacaaatagatataggaaggcatcactttataggtagctatgacatacacgctactcccaacaggacaaataccccaaatattaaaatcgacatacctgtttaaagagctatttacccctccgagcgagggtgaataaaaacacggacgtttcataattaacaaacacgggtctatccaccgaaactgccgcatcaacatccagatttttaaaatattctgtcagcactaattcatctaaaccgtaatcatacacgtatccccgtctgtcacgagagatgagatatatgttattattagcagaaaccccggcaaacttcacgaaagcacatcccggatataattccttaaacgaggtcattccttcaacatcgaaagtccgggaatccatattataaatccttccctcctcaccggaacaaaccaataaacgattatttacctgcaccatgtcggtcacatcttccattttcgtttgcgggtttatctgctccattatatccgtccggaacgtaggtgctttcccggtattaattttctcctttgttagtgttctcataaaagaaatccgtccttttccatccccatcccgacttaacaccgtgattccctccgaaaactcggtatctatctgtaaaacaaaatatttataccggatcgtttccccgttatcaaccctcaatcgtaacccgaaagttcccagttcccgaaaagcatatctcaattccggatcgtgcgacacgatatgtaacgaatctttaatcggataggacgccattccattttcatccgtattcaacgttccgtaactccattcataagcgagaggtagctcttctccggattgttccacgctcaaatcacttaccacaaattcctcaccgaaataagccgtcagcgtgtcatgaggtgcggaaattgtgatttccgataactcccgatctcccaacgaagactgatcatccagacaggcacccaatccgaataaggtaaaacacaagatcccgatactgtatttcgttttcatctccaataacttttatttgcttaacgaataaaccgatccggatcaaccatggcaaacccttcgtacgtgttttccggatcactataatactcgtaagctggtttcaacacgtattttatccaaatcatatttcccggcatctgaaaaaaggctgtcggggcattttccaaaaacttcccgtactccttctctttttcggcataaaacacgggttttaactcttccaaggcccaaaaattttccagtatcttcaaatataatcta

SEQ ID NO: 664 - DNA, 1757 bp, Butyricimonas faecihominis
gacagatataactaaccaaaatttctagattataaattctaaactaaattaattcaagatgacaacaaattcaaacacaaaagggactgcgatgaaactcggcgtgatgaccctcgcaattatgaatgtcgcggcggttgtgagtcttcgtggcctaccggcagaagccgtttatgggttgagttctgcattctactatttattcgcagccattgtatttctggttcccacggctctcgtggcagccgaattagccgccatgttcgcccagaaagagggtggagttttccgttgggtaggtgaggcgtacggaaaacgttttggtttcctagcaatattcctgcaatggatcgagagtacgatctggtacccgacggttctgacattcggggccgtatccatcgcgtacatcggcttgaacacctccgaagatgccctgctggcatccaacaaaatcttcacgctggttaccgtgctggctatttactgggtagcaacctttatctcgctgaaaggactgggatgggtaggtaaagtttccaagatcggggccatggtcgggacgattattcccgccgggcttctgatcgttttcggtattatttacatttccacgggcgggcataataacatggacatgagccaaggtttcttccccgacttgaccaagtttgacaacctcgtgctagcctcgggaatcttccttttctacgccggaatggagatgatgggtattcacgtgatggacgtgaaggaacctgcatcgaagaactacccgaaagcgatctttatcggtgccgggattaccgtggttatcttcgtgctgggtacgttcgcgctgggtttgattattcctgcaaaagacattaacctgacacaaagtttgcttgtcgggttcgacgggtatctcaaatacctgcatatcagctgggcatccccggtaatagctatcgccttgatgttcggtgtgcttgccggagtgcttacttgggttgcgggtccgtcaaaaggtattttcaccgtgggtaaagccggttacttgcctccattcttccagaaaacaaacaagatcggtgttcagaagaacatcctgttcgtacaaggaggagttgttacaatcttggcattgttgttcgtggtcatgccttccgtgcagtcgttctaccagatattgtcgcagttgaccgtcttgttgtacctgattatgtacctgttgatgttctccggagctatcgtgttacgctacaagatgaaaaaagcaaatcgaccgttcgctatcggccggaaaagtaacgtcgggatatggatcatcgccggactgggattctgcggggccttgctggctttcgtgttgagtttcatcccgccttcacagatcaacgtgggtagtaataccgtctggtttgccgtgctgattatcgggtgcgtcgtggttgttgccactccgttcatcatctactccttgcgtaaaccgtcatggaaagacccgaaagctgaaatcgccccgttccactgggaagaacaaccggttgccccggctacttcaacgacttcaactagcccggccactccggatgctaaaaaataaaaaacgtaaaaactaccccctctaactcccccttacacagggggagaaacgaacgcaagaaagcgccacaatgtttcaatgcagcgtatcctctccctgtgtaagggggagtcagagggggtagtctttcattctaaactctaaattttaaattccaaactataatcac

SEQ ID NO: 665 - DNA, 1754 bp, Butyricimonas faecihominis
atgaaaaaacaggtgatacgccaatatcacctgcctaatcctgaaacagattcaggacagtaacttatctaatttacaaatgtatgaaaaaaaagttcaaatgcaagggctggtattctggcttgagaaaatgttgtcttatgatgaagtttttcatgttattcatgttgcttacggtacttcaagtgaatgccgtggtgaaatcgcaggagacattgttaaatgtaaacgtggctcgtgtttctttggtggaggttttaaaaatgatcgaatcaaagagtgactatacttgcctttatagtcacgaggatgttgctaaagtaaatgacttaacggttgaactgaaaaatgtgaccgttcaggaaatattggatgtttgtttaaaaggaactagattgggatataaaattgtggatcagacgatagtgatccgtaatttgagtgaaatggagcaaaaaaatggagaggcgaaacaaagaactattacggggcgagtgacagataagagtggggtacctcttccgggagtcacggtgatgattaaagggttgtcagtagggacggctacagacgtgaatggcgattataagttggcaattccccaaggagagaaagattttgtccttcaattttcttttgtcggaatgaagacacaagaggtgaaatatgtgggtaaagatacgattaatgtggtgttggaagaggaggtgaatacgatggatgaggttgttattaccggatatcaacgtattgataaacgtaaaaatgctagttctgtgatcagcgtgaagggatctgagttacaggaaggtgctgctatttcgattgataatatgttacagggaaaattggcaggggtgaatattatcaatccgacttcaactcctggtgcagctccgaaagtgcgaatccggggagcctcttctatttctggaaatcgggaaccggtttgggtggtagatggaattattttagaagatccggtgcctatttctgctgaagagttgaatagtttggataacgtgaatttgattggtaatgcaattgccagtattaatccggaagatattgatcgtattgatgttttgaaagatgcatcagcaacggctatatatggagtgaaagcggctaatggtgtgattgtgatcacgacaaaaaagggtaaatatggaaagccaacagtgcattattctggtaatgtgggaattagtttgagaccgagttataataatttgaatcggatgaattccaaagaaagaattgatgtgtctaaggagattgaggagaggggattgacgttcggaataaaaccttctaatatcggttatgagggagctttgtatgatttgtatgctaaacggattacccaagaacaatttgtggatcgggtgtatgatcttgaaaaagtgaatactgattggtacgatgagctttttagaacggacgtgtctcataaacattcattatcaatttcgggaggttcggagtttgtgaattattatttttctgcaggatatgcaaatacaaatgccgtggtgaaaggttctgatgtggagaattataatgctcttttgaagttaaatttagaattgagtaaaagattgaatgtcgggttatctttgagggcttacgcggcaacaaagaaatatttgcatggttctatcgatccatatggttatgcttataatacttctcgtgcgattcccgcttataataaggatggatcttatttattctataataaaacagaaggt

SEQ ID NO: 666 - DNA, 1753 bp, Butyricimonas faecihominis
cataatgagactttataaaccttataaaccttataaactttcaaactttacaaacccattatcccgtcatggcaaacgactatttccaattcaaacaattcaccattcggcaagaaagatgtgccatgaaagtcggcacggatggtgtccttttgggagcgtggactgctgtaactcatgcacgacgtttgcttgatatcggtacaggaaccggacttatagccatcatggcggcacaacgcaatcccgaattaattattgatgctattgaaattgacccggcagcttttgagcaggcacgggagaatgcgaacaatacatcatggcgggaacgtatccatctttttcaaggtgaagtgcaagcatttgcacccccgcataaatacgacatcattgtttgtaacccgcctttctttatcaattctactaaaaatccggaactcaatcgcacgttagcccggcattgcgaaacattatcacacgaggatcttctccaagttagcgacaatttactcttaccggaaggcaaactctgtgtcatactacctgttaacgaagccaaacattttatagaattaacccaaggcaaaaaatggtttgttaacaaattatcaacagtttaccccactcccgacaaggctcccaaacgtcaactcatcgaactctcgaaagtaaaaaaacacctcataaaagattcaataacccttgaaatagagagacatacacttcacgagagttacgcgaacctaaccagagatttttacttgaaactctgattcccgaaggtttatcccgttccacattttcatcaggatttaaatctccttacagaaaagattaacgatctattaactatcgaatatgagaataccccctatctttgtaatgtagaaaacagatagaagacacagttttttttcataagtttgtatgtttaggttagtagttagtaatgtaatcttaagagtcgacattccccgtcggctcttttgtatttaaagacgaaagatactattatttttacagaaacaaaagttaacaattatgaatggaatcatcgaaattgaaggaatggaatttttcgccttccacggatgttatgaaacagaacgtgtcgtgggaaataaattcatggtttacgcccgtatcgaaacagattgcgacaaagcagcccaaacagataacatcgcagatgctttaagttatctcaccgcatacgagattatcgccaaagaaatgatgattacctcacacttgttggaacacgtggcaaaaagaatgatcgacgcactatataatgccttcccgcaaatttctcatgtaactatcaaggtttcaaaactaaacccgccactaggagggaagatcgcagccacgagtgttactttgtcaaaataaattacagcaagatattgcaaaattcaaaatatcgcattatctttgccacgcaaaatcgcaacagggtcggttggccgagcggttaggcagcggtctgcaaaaccgtgtacagcagttcaaatctgctaccgacctcagggaatcagccacttacaaagtggctgatttttatttataggggtgtttttaggcgtttttacccctctcaccgctaccaaaaccgctaccattttcaggtatctgtcattaatcaataattcattaaactctctttatcaaagcattactcttaatgcttaccattttccaaatccctaatacttatttgggtataaaatttacaacaatcatactc

SEQ ID NO: 667 - DNA, 1752 bp, Butyricimonas faecihominis
accttctttaatgttgtaattttttttatatgataccattttcaccaccaagaattgaccagaaggtcattgatgaggttgttgataccttgaagtccggttggattacgacgggaccaaagacgaaggagtttgaacggagactgacagcgtattgtggaaacaaggcgacgttggctgtgaactcgaatactgtggggcttgaagttgtactgcggtggtttggagtacaggagggggatgaggtgattgtgccggcgtacacgtattgtgccacggcgaatgttatcgtgcattgtggggcgaaaccggtgatggtggatgtgaatgcggatgattttgacgtgtgtttggagaaagtgagggaggcgatcacggataagacaaaggtgattatgcctgttgatttgggaggtatgccgtgtgcgtatgatgagttgtttgaattggtggaggctgaggatgtaaaaacgttgtttcaggcgaagacggaagagcagaggaagttgggacggattttaattttgtcggactcggctcattcgataggggcggaatataaggggcggaaagcgggatgcctggctgatgtttcggtgttctctttccatgcggtgaagaatctgaccacggcggagggtggagcgatcatgttgaatttgccggagccttttgataacgaggaggtgtataggtatttatgtacatatactttgcatggacaaaataaagatgcgttggccaagacgaaaaggggggcgtggcgttatgatgtgcttgtgtccggttttaaggggaatatgacggatattatggcttctatcggtttggtggagttgtctcgttacgaggatgatactttgcattatcggaagtgtatatatgatcaatacactgatgcttttgcccgatatgggtgggcagaattgccgatttatgaaacggaagaccggaagagttcttatcacgtgtactgtttgcgggtgaagggaatcacggagcaacaacgggatgagattattcagcggatttttgacaaggatgtctcggtaaacgtgcattttcaacccttgcctttgttgagtgcatttaagaataaggggtataagattgaagattatccggttgcttacgataattattgccgggagatttctttaccagtgtggtatgggttgagtgaggagatggtaaaaacggttattgatgctgttatttgttctgtagaagaggttttagcgtgatacgcttttgtgatgttttcttttctttattgggcttgatagttctatcacccatttttgtgattatagctttatgtatcgtgttggatagtcggggaggtgtgttttatcgtcaggtgcgagtggggcgggatggtaaggatttccggttgtttaagtttcgatccatggcaagcggggcggataagaaggggttgataaccgtgggggcaaaggattcacgggtaacacgggtcgggtatttcctgagaaagtataaactggacgagttgccgcagttgttgaacgtggtgcgaggagagatgagtttggtaggaccgagaccggaggtgaggaagtacgtggatatgtacactgtcgagcaacataaagtgttggcggttgttccgggtataacggattatgcttctatcgagtatgcggatgaaaatacaatcttgggacaggcaagtgatccggaccgggcttatgtggagcaaattatgccggataagatacggtataacat

SEQ ID NO: 668 - DNA, 1751 bp, Butyricimonas faecihominis
ctctttatcttttagttctttaacttttatcacaaaatagtattccaactcctcctctgttctccctccccatccccccttcggggtacttcccctcaggcaggggaagaaagaggtggctgcgaagcagacggaggagttcattgccatggaaacaccttatttacaagaactccctccccccttcggggtactccctctataaacagagggagagctgaaatactcaccgtcttcgggaaaacttcccattttccattctaaattctaaattccttccacccttactcccttctccctcatctcctccccatcgcccaagtcaggcaccacgctccccgcgacaatcccgttcgccccgctcaatccccccttcccgtcaccgggaacatgaatctcgcaattctccagcacgatcgacgagcaaggaccattcttcccggccccgatcgccgcggcaccgtcactccccctcgccgtcaccttccccccggtaatcgtgatactcccacacccggcattactacttccaccgatacccgcgttcccctgatcacccaagcctcccgtcgcctcgatcgtcccgctctctatcaccagatcacccgccgaatgatccatatagctaccaatcccggttccccccacactctccgcgatcagctttccttccccgcgcagcgtcaccttgcaacccggcttgtagtacaatccactataataccccctaccagttaacctgttcgtccccaccagcacgatcaccggattaccactcgacacctgaatcgatgatacataccacccctctatcgtcgcatccaccaaatacaccgtcgggctacccttgatgatcaaactatagtatttactctcccccgaaacacaataaaccccgtcatcagcaatcgtgtaattacctcccgaagacaaatccacctgccgcatcatccccgcctcgcccccgtcgctcgtcccggtctcccaagcgctgatgctcgtcgaaaccagctccagcctctccttccccacgtaaatattatacctgtacttcttcccgctctccaacgtcacgttactataataaaacaacaccttcccgtcctttaaatctacacgtataaataagccagttccgggcaccgcgatcgcctccccgtactccgtgttcccgtcaaaattcccggtaaccctcgtgtctatcgttataagcccaatagaactcccatccggagcaatcatcttcccccgctccgcggcattctccatcacggcctccttgtccggcatgaaataccctctattaaccgtacctccaacactaacaacagcccccgtcaaatcccccacctcatcgctcgccttcagcgccacctccaccttcgagagcaggtgatagaacgtcaactcccgtgtcgtcaccccgtcactctccctcccgcggctcaccccccgctcgatggcgaacaacaggtccgacttcgcgcgattcgccacgcctatctccccggcctgcatacgctccacctcgcaatatagcatagcaggaaaccccatcaccccctcctcgatcacgtaattgaaattcccgtgcatcgcgtaaatattcacgtcgttcccgttctccgggaaatagcacgtcgtcccgtccagccccccgttcccgtccgcctccagccgccacgccttcacgtgagccaccgccgggttcaccgcctcgtccacccacgcgtggaccacctcccccgccg

SEQ ID NO: 669 - DNA, 1748 bp, Butyricimonas faecihominis
aatataatcaattttcctcttattgttgaacattcggcaattccaaaccaaggcctttcaccttatcaacacgtttcaggattacaccgataaccaaagcggctccccccaaacaagccaacatgacaagaggccaagtatagtcataggaaacagctgcttgttccggggtgatcacgtgattcttcaagtcatttacaacttgaggattcgtgttatccaacactttaccgatcaataacgggaaaagccacaaaccgatattttgaatccagaagatcaatgcataagcagaacctatcactctctgatcaaccaacttcggaacactcggccacaatgaagccggaaccaacgagaacgatgctcccagaattaaaatggtcacgtacgcaatcaaaacacctccgatcgcactacctttaaacagaggtaagataaatgcaaatgtcaagtgacacacgatcaacaagattgaaccgaacatcaacatggtagcagccttacctttattgtcaaccactttaccaagaatcggcgtgatacccactgccaacaacgggaatacggcaaaaatagtctctgccgactgacgcatataacccatgtagcagaaaataatcaaacctattacagagatagctagcaacaaagttttcaatgccttcttgcttgtaaagttaaatgcaaatgcagtggctgcaacaaccagcatgatacaatattgaataattgtcacagcattcccagcccagaaagaaccttcggcaggaggagtaaatgtcaaattacattgtagcatgttaaccgcatatttctggaacgggaaaatagccgagtaatacaatacacaaagtaatgcaaccaaccagaaacctccactggacaggattttcccaatatctttaattttaaagggctcatctttttcttcagcctctccggtctgtgcatccaattttttatccatgaagaaataaacaatgaacatgatcaatgcaatcatcaatagaaccacaccaaaagcaacagaacgagaaacatcaacttgcccaccaagtttcgcgaagaacggagagaaaatcatacaagtagcaactcccaaacgagccaatgccatttcggaccccattgccaaagcgatttcacgtcccttgaaccatttcacgataccgcgagaaaccgtgatacctgccatttccacaccgcagccaaagatcatgaaaccaaccgcagccagtttagcagatgcaggcatcccctgatagaatggggagattcccaactcgtcaaaacccggaatataattcaaattgttcgtaaaccatgcttccaacccgcttcccttaaagccttctgcaacagcataccatttaataaccgcaccgattaacattacaccacctgataaaagagccgtaaaacgaacacccattttatccagaatgataccggcaaaaattaaaaagaatacaaatacattcaagaatgtttcagaaccttgcattgttccaaatgccaacgaatcccaaccacgttccgactgcatcaaatctttaatcggtgataaaatgtccataaatatgtatgaacaaaacatggctaatgccagcaacaataaagcggcccaccgaacggctgcattgtctctaagagtaagcttttctgtcatttgaatttattttttatagaaatgaagaaaataaacaatgttttcctataaccacgcacctttacctcttcacatc

SEQ ID NO: 670 - DNA, 1747 bp, Butyricimonas faecihominis
attctacgatatctaaaaagtttttccggcatattaggaagtattaatttataaatattactccatacatcagaagtcgcagttttatctatattgaaaggaatataggattgctctataatctcttgaaattgttttctaaaatccaacatctgcaaatcgtgaatttgttatttctttatctcattaactcaacaacattttccggcaatatggcgtttcctacatcatctttcggcgcattcttaagaaatagaattggcacaatggtgtagttcttggcaaacggtaacatattagctttgcggagtagttcggctgttagctgtttaccattctctcgtgttgtccatttacattctccaaccagcaaatactttttatcaagcgattctgccattacatcaaattcgacttgttcaggcttcttatcctcattgaaaacagtcccccaccagcgttttgctttgccataaactactccattgacaagatttcccgttacagcatcccggcacagtttttcccatttcatactcacatattccgagaaatgggcgttcaaagcctgttctatgggcaagcgacgaccaagttcaatgaacgaacgattaggaacgacaaactgataataaaatgccataaacggatcggctatcttatagagactctttttcgcattcttttcatcaatcccaaacggaacatctttttccaaaaatccgagatcaataagtttcttcaatggacgtgacagattggttgccggctcattacatcgtgcagcaatctcggaaagtcggtttgcaccagtaccaatataagacattatcgtcgaagtcttgactatatctttcacatcgtcctgaaacagttttatcggttcttcgtaaagagttccattcacagaaaggatattacgccatagggcatcatcaagcgaacttctgttttctcttagttcccaataacgcggcacacctccccaaacagcatattcttcaatggcattcatcgcatcaaggctcaaagcctcttgaatatatggcaaacgtatcggtgcaagtttcatgatctcatcagcacgaccatagagaggtgcagtagaatcaagaaacaacccatacatcatattttgcgatgaaccgcaaagcacaagattatacttcagctgcttttcatcaaccagtttttgcaacacagatggtagttcagaagattgctctacaagatacggaaattcatccaagcacaaagtaaaacgcttgtctgtgcgataattgaccgcacgaaacatagactcccaatctggatatgtcagtttgtcgaaatccgggaatatttgtgctatcacttttgcaagcaatgtcctctggtgttggtcttcagaacgatcggcaaggaaataaacatcattgtccgacaacactcttttgataagcgttgacttccccaatcgtctacgaccatacataacgactaacgaggacttttctctcgcaagagcatcctttagacgtgctgcctcatctattctatcaacgaatttcatatactctacctattatgcattgcaaacataatgtttttaaagcataatacaaaatttaaaatcatattttttatcctcacagaagcatttataacttacgtataggagaacatacatcttctgctctaattttcgggataatttagttcccattatattctttgccatattcaatgcgtcatataatatgcaaag

SEQ ID NO: 671 - DNA, 1743 bp, Butyricimonas faecihominis
gcttggaagtgtcgaagctaagctgtaatatcttttgtgtgtaaagttatataaaactataggttttagatttttgaaaataggattgtatgggaaaaatatgaaaagtaaagatcgtgccttatggaaatatataatctctttaagagaaattcttcaaattgatacgcaaattccaataataaacgattttggtaaaggatattgcttaacattaaaacaatttgcttagcgtaataaagttgtgtaatgatttggattcattttagggtattgtctaaaaatgtaaaagtcaacaatcttgtcataagatagttgacttttatattttatttaagtatgattcgatttacttgcacttgtaataagaaccgactattgtatgtacggtaaaccctttttcctttaatattttttcatccattgcagcctctgttgctgttatctcgataacagtgtcgtacatcttatttagctcatcttttgtacgtgggttcgaagataaagggtttgcaaaaaacttcttgatgtcttcaggatccatcatacgtggaagtgtgtcatagaagatcgtgaacattcgttttgatctttccgagtattctttaaatgtccgaatctgcgcctttctatatgcttcttctaattcatcacctgtacatgctgttctatcttttatataatcaagaactagttgtggcttgtttggattatcatcatagtagaatattcccctttttttacggatttgggctattatcacggaaataaaattctgatacaagatctcaatcttttccatttttgtttcactccgattcggaacaatctcactaaaattacgagcaaatgagacaacgggtatatttgcccatttagcttgaggtcctcttttccattttaattgaatcgtgaaatcaacgattgaagccaatgtcgcgaaagccttgttcagtcgtttctttttaacggaaaaagattctgaatttatattggctagtttacacaagaaatcaatatcactctcgcattctaattgctgattgaatatcgtggtttcccgtaaattcttcatcgtgatatataggtcgtcaagatttttcttacgcaagatattggcttgaggaagatctattttcatgtaatataaacttagattattcctaaagttttcatccagagtatattcgtataaaattttgggcttaccacgtggggactgtctaaatgtaattacaagttttgtgaatatgcgataactttctaacgttaattcctgtattgtatcaccgttttcgatataagattttgcaccagacgggaaagtaatattttgattcaagagcatatataaagcattttctaaccaagaatcatatacccgacaagatatgtcattagggttctcgtcttgtttcttataagctaaagctttttctttatcgcttaggtgttgtaagcaagccggtgaaggatgacgggtggtaagagtattgagttcatactgcattacttttgcgaaatcatgcggatcgataatgccttcgttaaaaagttgattctttagttgattcgaaacataccacacgactgatttcaccatggctttattttgctccccaaaggtcgaaaacagtgttatgtttttcccgagattgcgatcgattcgaagtgcacttttttctttaactagaggtacattagattcaatattttctttatctttgtccatcataataatat

SEQ ID NO: 672 - DNA, 1742 bp, Butyricimonas faecihominis
aaataatgaagaaaaaagaaggattatctaggttactggaaattgcgggagaaaaaaaaagtttattgcttttctccgggttattttccgctataagtgcattatgtatacttataccattttggtctatatatgaaatattaaaggaattgcttgttcatgcttctgatttatctacgatagattctgagctaatgatcagttgggggtggcttgcttttattgctttgattgtgggtgtactatttttgtatgcgggattaatgttatctcacatagccgcctttcgtattttatatgggttaaaaataaaactttcagagcatataggtcagttgtctttgggatatttaaattcgacatctatcggttgtataaagaaaatcatggaacaaaatgtcgaaaaaatagagcattttatagctcacactattcccgatttggtgaatgtgtttgcaaccataacttttatgtttattatctttttttctttaaatggttggatggcattcaccgctctattatgcatacttttaagtataggaatgcaattttctaattttgtagggaaaagagctactgcacttacgaaaatctattttgatgtccaagaacgcatgagtgcttcagctgttcaatatgtgagaggtatgccaattataaagatatttggacaaagtatacgttcttttcggcagttcaatgccgaaatcgaagcgtataaaacatttgctttaaaatgctgtaataactatcaaaatggtataattgcatttattattctgttgaattcaatagtcacgtttattcttcctgtaggaatattaataatgacctctgatcctaaaaacatctcattagctgcaatttatctttttttcatcgtgatggggcccggagtagcttcccctgtatataaactcgcatttttagcttcaggaactgtagaaattaatgaaggagtaaaacgtatagacaaaatatttgaggaaaaaaaactatgtgaaccagttgttcctcaaatacctcagacgtatgatattgaattcagaaatgtaagttttgcttacgaagatagagaaaatatgacaaagacagaagcgctgaaggatatctcttttatcgctcgacaaggtgaagtaacagctctggttggaccttctgggtcagggaagtcaacaatagccaatctcattcctcgcttttgggatgtttcctctggagagattttaatagggggaataaacataaaaaatatttcctcaccccaattattggagatcgtgtcttttgtattccaagatacgtttcttttcaatgataccatatatgccaatattacagcaggaaatactcaagctagtttatcggatgttatacaagctgctcaagctgcccaatgtgatgattttattcgaagtcttcctaaaggatatgatacgattgtcggagagagaggcgtttttctttctggaggagaggcacaacgaatttgtatagctagggctattttacgaaattctcctattttagtattagatgaagcaacagcttttgctgacccagaaaatgaatataaaatacaacaggccttacaaaagttaataaaaggtaaaactgttattatcatagctcatagattgtcttctatcacctctgctcatcaaattcttgtttttaaggaaggatgtttagttcaaaaaggaagacatgacgaacttcatgttactacaggcatatat

SEQ ID NO: 673 - DNA, 1741 bp, Butyricimonas faecihominis
atataaaaccgatagagcctacgattcaacgtgtaagagaaattttgggacaatggggaatagagcccggatcatatttttatacaataactggaaatgctccaagtaagaatttcccgttgataaaggaagttttggagatattgaaagaatatcgatttgtgataacaggaataaaactagaagattgggatgatgctcctgataatgtttcgattacaggttttgttacagaggaggaaaaagcaattttattacagaatgctaaggcttttctttttttatctttggaagaaggctttggtattccggtattagaagcaatggtgtatgaccgtaaaattcttgcctcaaattgttctgcgataccggaagttgtgggagaggggggatattgtattaatccttcaaaagatattattattgatgcaattcatcattttgatcaacctaaatggggtacacgtgaagggcgaatgaaacaattacaaaggttttcatcttggaccaatagtgcaaaagttttcttgagtgcaattaatgatttgtgcatatgaaaaaaattttagttatgagctctcgggctccttatcctttacatagtggaggagcaataagaacttatcaagtaattaaactactttcaagaatatatacagttgatttggtatatataacggatgatctgaaggatgagaccgtttcagagatggggcgtttttgtcgggaagtgataccatttcctgttcggaaaatggattattatttaaatgtttgtaagggattaatctctaatactcttcctttgcaagttaattatttttatttcgataaagttcaaagttgggtagatcggaatattcataaatatgatggcgttttttgtaataatattcgtactgcagaatatgtgcgaaacaaaaaaggtattactaaatggcttgattttgttgatgcaatatcaatgaattacgagaaagctaaaaaacaagaaacaggattgtggcgttggctttacaaggtcgattttacaagatgtcgccgttatgaacaaatggttctaaatgcctttacgaaatgtatgattatttccgaggttgaccgtgattatattctttcaaagtataaaggagaaaaagacattacggttattgggaattatgtagatatttcggaaaaagtgaatttacacaaaaaaaataattatcagttacttttcgtaggaagaatggattatgagcctaatgtaacagctgttaattattttgtcgagaatgtttatcctttagtcgagaatgaaatcccggaagttattttttatattgtgggaatatctcctagtgttgcggtaaaaaagttggcaagagttgataaagttgttgttacggggtttgttgaagatgttgctatttacatgcgggagtctgctatttttgttgcaccaatgcgttctggggcaggagttcaaaataaaatattgcaggcaatgtctatagaaggatgtgttattacaactacgataggtcgagaggggatagaggtgtgtcatgatgagcttattgtagcagatgatccagtgataatggctaggcaaattgtattattattgcgtgattcagaaaagagaaaaataataggaaaaaacgcaaggagatatattgaaaatcatttatctgaggaggttatttattcgaagttacgttcttttattttggatgaatagattaataaagtatgaaag

SEQ ID NO: 674 - DNA, 1740 bp, Butyricimonas faecihominis
aggttgtacggagagaataaagtattattgtgatgttttttaatttgatttattctaaataatctaactttttcagaaaaaatgcgtatattgtagaaaataaatcattgagatatggaaagaaaatttaaagaagctttggcacataggagaagttattatgctctctcgaataaatcacttgtttctaacgaagagatagaggaaatcgtaaaatttgccgttaaaaatataccgtcagcatttaattctcaatcaacgagagtggtgcttttattaggtgatcaacatacgaaactgtggaatatcgtaaaagatacgttgcgggaaatagtttccgcagaggctttcaaatcgactgaaaacaaaattgataaatcctttgcatccggttacggtacggtgcttttctttgaagagcggatgatcgtggaaggcctgcaaaaatcatttccgacttatcaggatagattcccggtatggtcacagcacacttcggcaatgcaccaactggcggtgtggaccatgttggaagatgccgggttcggagcttcattacagcattataatccattgattgatgaagcggtaactaaggaatggcaactaccggaaacttgggaattaatcgcccagatgcctttcggtgcgcctttacaagaacccggggctaaagagtttaacccgatagaggaaagagtgcgtatttttaaataaccactatttcatccggaaattaacccacacggctttgtgatctgttggccatacacctaggggtttgatgaaaacatcttgtccggattcagtcacacgttgactcttgcgaatactggtcttggggccgagaatcgctgcatcttttagatgtagtcctttacgaggataatagaagatgtaatcaatacgatcgcgctcatcggcatcgggagtccaagtgatcttacttggaggcaaagcgagattatccgacgggtaagtatagccgggatgtgtaacgggattggggtatttttcacgataagaatctttaaagccagcttcatggagtagggtggttaccggccaaggaaccacaactccatgatggtcggcactatctttagtcgtttcaatccaatcgaggtgagaaggctcgttaaaatcaccccctaaaaagatccaatttccttcttcaatttctttttgagcatctttgataaaagcacggatggcatcatcgcgtaatgaaaggttgttacgctccaaaatagtcggaacatcagtcaaaggtgcatccattttgtgccaattgttaccgtcataaccccgtacttcataatacgtgtcattcagatagtctaaatgagcggtataaacagcacaaacttgttttcccacggtagttttcattttataaatagttccgtgatcatcttgaatcgggaatatcgtactactgtctgttataggatgtttactaagcaatcctgaatcataactataaaaagaataatacgttttacccctttctttcaaggcattcacgatacggtcacaaaagcgggtatcccggtaattccggacttcactcagcatgataaaatcgggttccaaacgggctatttcatcagcaatagcgtcaaaaccgcccggaatcatagagccttcctgccagatgttaaactgtaacatactaaggttttgggatgaagaacagcttgacaataaagtgattattcccatgatgcaccctagaaa

SEQ ID NO: 675 - DNA, 1738 bp, Butyricimonas faecihominis
atattatattgtatggctatttgcggtactttttatcgtgggatgtgaggatcttgaggatacttacgatgaatatgccggtaatggtagaattcattatgtgggaaaatgttcgaatctagaagttctaccgggttggaaacggctaaaagtgaaatggaaaggaaatctggatgcaaatatagatcatgtcaaagtaacttggaaggcagaatcagattcagaatcgcatgtactctttttacgaccgaaggatgttgtcgaaaataataatttagtagattcttgttatctggagaatctcgcaaatgcagtttatactgtgactgtgagtaatatttctgttgatagtacggaatctattgtggaatctgcttatgctcgtccatacactgaaagtcatgaggatttacaaacttttactcgcgggattattaatttctatccgttgaatggtagattagccgtgatattagatgatgtaaatgagaatataagtgagatgaatcttgtgtactggggtagtgatggagaacagcatacttggaatatcaaagagcatatgggattacggttgtctttgtttggggaaattgattttgggcgagattattatttcttaatcccgggggaaggagagccaggaattgatttctcgaaagagataaaaatacaacggaaagggaaattaccgaattgtatcgatgagattaatttcgaagatgcaaccttgttaaaagatgaacaggtatggtcagcaggattttcacagttgttgttaaaacaatatggtggagtgacggatgaaattattaattcagtggaaacaattgaattagattatgatatggcttcattccaagatttgttatatttcccaaatttgaaaaaagtaattcttggaaaaaatcgttatatgatagatggatacacgagcatgaatgtgagtactacagacgtttataaaggattattaacattgcaatttttgaaagattctcgtgagggttttaccgtggaacgttataataatcattattttggtaatgattttgaatcagtttccattactacgatggaatttatgggtaagatcaagccagggttattgagtgagatgaaaaatacaaatactttaccgaaggttgtaccattagatacgacgggttgggaggtcacttgtactgatacggtttataatggttacaaaacaaatggggctgcaaatttgctgattgatgacccgaaattttatttcgaaccgggactgacatcgagtgtgaaagtttttgaggtgaaatttgatatgaaaaaacctatggtagtgaaaggatttaaaattgtgcagcctactcaagggactcaaactgatatcaaatatctgttaccttctttgaaaatagaggtatctaaggatggttacgaatgggagaatgctacatacgaaaatggagggataaatattggaaatactcccggggaaactacatttatatatgtgccggaagttttgcaaaaatctgtacagtatgtccgattgactattgttaatcaatatgttaatgcgacatcagatggatctccgttgtttagtttacgtttgggagcttttatccctttctaaaatagcgtgtttcagtgaatattacgggccgggtttttatccccggcttgtattttcatgtaaatttaatgatagattattatgtgagaggatttttgtagaaggaaaatatat

SEQ ID NO: 676 - DNA, 1709 bp, Butyricimonas faecihominis
gtatttatgaatatggataacacttctgttgacaatgcattgaaagcaatgaggtatgttattcttattgatgaagctcatgttttatttaaagagaaaaaatatcaatatattttagagaaaattttaagggaaatacgttcgaagggggttgccgttgttttattatctcaaggtatagaagaatataatcaacctgattttgatttttctaccatgtgtgagatcgcttttttgcttgatataaaagataagaatcccaaagtaatggaaaagtttttaggactttctggtaagaatgttgtaactttagctcgtaatatggagcaaatcgagaaagggcaagctatttcgaacataaaagaatttgaagttgctcgaaagttttggataaaacagtattggaaacgtaataaataactagctatggaaacaacttctgattatcagactatatattacaaagatttaattttagatccgcaaaatcctcgtctgcctcgatcaaagcataatttggatgaaagaggaattattgattatatgcttttggaagctgcgacattagaattaatgcaagcgataggggagaatgatttttttaaaggagagcaattgttagttgttcatgaagggaataaatataaagtattagaggggaatagacgtttaaccgcaataaagcttttaaatgaacctgaattagcatcagtgaagaaggcttctgttcgagagatttatgaggctgcccaacatcgtccaactcatattccatgtttaatttttaatacagaggatgaaattcgaagatatttaggctatagacacataactggaataaaaccttgggggctgactgaaaaatcgcggtatttgtacaagttatatttcgatgaatttaaaggtgaaaatatagataatgctgttagtgaattagctaaaaaaataggtagtcggaaagagtatgtgaaaagagtcattattgcctacgagatatatcgaattgtagaagatgaaggtttttataaaataaaggatttagatgatacgacattttatgtaggatatttagtggattcattgaatcgaagtcatattgctgcatttctagaagttgatatgtcatcagatagacctttgaaaagtctgaataaagcaaatttgaaggaattaatattttggttttttgaaaagaatgatcaaaataaaactaggattaagggtaaaagtagcgatttaaatagtttaaacgctgtattagggagtcctgtagcttgttctgcttttagagagggaaaagacttggaacgggcatttgaacttacagaaaatgttgaatctgtattttttacaaatatacaaaattctttaaaatctttggagcaagcagatgcattagttcataaaattacagatttctatataaatcttgagtctgatttggtggaaattagaaaacttacttctaaaataaagcagactaaagatgaactactaaaaaaaggagtatttggagatggtgatgaattttaatgaaaaattgaaaaagcaatttcaagattttactcttgaaactcccaatgtacaaaaatatatagaacatgtgtatgctgattttgtagagttgaatgctttatttctaaaagaagaagtaactgttgctgatatttcagataaattacaagatataaaagattctaatatattag

SEQ ID NO: 677 - DNA, 1695 bp, Butyricimonas faecihominis
gttttacaataaaagagaccgacaaggctttgtctgaggctttgatagataagattaataatttaaccaagcccaagggatctttgggattacttgaaaaaacagcacaccagatcgggttgatacagcaaacgctttccccggagttacggaacccccagaatattatttttgcggccgatcacgggatcgtgaaagagggggttagcttttcggctccggaagtgaccgcccagatgatttttaatttcatcaaagggggtgccggggtgaatatgttttcccgtcaacatcatttcgggattaaattggtggattgtggggtaaatgcggatttcgaacctatggaagggctgattgatcgtaaaatccgtaaggggacttcaaattatttgtacgaggccgccatgaccccggaagaatttgaccgggcaatcgagatcggagtggagatcgtggatatggttcatgatgagggttcgaacgtggtgagtttcggggaaatgggtattgccaacacctcttcttcttccctgtggatgacttacctgacaggtattcctttgagcgattgtgtcggagcgggtagtgggttgtctagggaaggcgttgaacacaagtataatgtgttgaaacggtgtatggaaaattacgagggggatggaactccgaaagacattatccgttattttggcggcttcgagatggtggctgccgtgggaggtatgttgcgtgctgccgaattgggtatggttattatcgtggatggctttatcatgacgaattgtgttcttgccggaaagatgttgtaccccgctttaacggattattgcatctatggtcaccaaggcgacgaatgcgggcataaattagtcctggatttcttgcacgcccaacctttattaaatctcggtttacgcctaggtgaagggacgggggccatttgcgcttatcccttactcgtttcagccgtgaacatgatcaacgaaatggcctctttcaaggcggcagcagtaacgaaatactttaagtaattgaaaattgaatgtggaaaattgaaaatgaaaagtttcctgaagacggagagtaatccaactctccctctgtttatagagggagtaccccgaaggggggagggagttcaacataaaaaataagctatgataaatcccaagatcacccataacgccaagtatcaacaagaaacccgtagagaactacgtctgcacggtacaccagcggaagcggccctttggacactcctcaagggacgacaagtaaataatttaaggtggcgtaggcaatttagtattgaaacatatattctcgatttctattgtccgacagcccgactttgtattgaattagacggggcaagccattttacttccgatggcgaatataatgatgaacgccggacggaatctctttggcaaaaatatggaatccgtactctccgttttgaaaacaagctagtttttgaacaaccggaaaatatactcgaaacgataaggatagcattggctgaaggaatacaacaaactcctccgtcagctacgctgccacctcctctataaacagaggaggagctggtaaccattctcgaagacggtgagtaatccaactctccctctgccagagaaagataaaaagtaaaaactaaaagataaaagttgaatgtagtaaatctagaag

SEQ ID NO: 678 - DNA, 1688 bp, Butyricimonas faecihominis
gataagacgttagaatttcttgatcaaaaaaacttaaactaaattagtaacaatgttttattctatgatatatctgtctaatttggatacaattataacagttgcactctcttgtttgtatttggtggaaccgtaatgagtaaacgttccgctaaatttaaattcatttgcgattacctcgtctggatgtttaagtgcgtactcctttatatcaccaacattctgtgttctaataaacccaaatccacttttaacaagttgttcacttagtttttggttattcctgattacatcattacattttttgattacttcttttcctgttaatgatttaacatgttctcgtgtcgttatttgtggagctttatagtaatcaatctccttggaaagggcttcctgttccgtcatgtaagacttttgtttaataaactcttgttctgcaagtttcatctcgttgtttatagatgaagaacaagctactataaggagaattatacatgtagtaaatgctattttcataatacgttgtttttaatagtttcaattctaataatcaaataaatgcctatattcgcaacttgttgtggtacatacttcgttagcaagaatgtacattaccacgaattatactaaagcgtcattattcataaccacttggttttatgtacttcctaatcccaagaagtctattaatgattgaaagcatagggattaccaaaatggtatgcttcctgcaagttaccctctcttcaccaaacttattacgattccaaggatcagaatacacaaccacgtgtagtgtccgtcaacaagtgttataattgtcaatggtaaactaataactattgataatgcaaacacggctccacttgggataaataacatgataatgccagccacaataacggcaggccaaacaatagaatccatatactagatcaataagtacccaagataacatcaacgtaaggactgtaacctccattgtctatactcacctctaaaacatcaatatcacagaatttcatggatgcttcaatctttcttaaatgttccattaatgaagcaccatatattgcaacggattcaatattacccgctggatcaggacaaaacatgtacttgttatagaaattcccattgagatacatgtcaagttgcaccgttccattgccaaagtcattgatcctttctatttggcaattactaaataggggatgcgataggagattattgtagatattgtttatcactcgtaggcttttttcattaaaactgttgtacataaggtcatattttacacccctaatcccccaagaggtattaatacataataaagaaagcgtgggaattgttagaattatctgttttagaggttctggtaaacccttgcttcaagataaaacgacaccccacgctaaaccagtatatataacagaatagtatatatggcaagcatgagcgtttgtaccgtctatccctaaagcaattgaaatgtaccagatttctaaaacgggataaagcctaaacgctttctatttaactatgttcgtcatggcgatctctcgctacaactctacaaatgtaaatataaataacgttccgtacaaacactcggtggggtgtcttgtcacaaatttagagtaatcaattgaattaaaagaattaatttctaatggttttactct

SEQ ID NO: 679 - DNA, 1680 bp, Butyricimonas faecihominis
tggatgatcccgatgttgcttttttgaaagagagatttgaaataacgaattaccctgcttatttcttgttggataaagagggtaaggtcagatattcttgggaaggcatgatagaggaggatcaagcttttagagattctttacggaaagggttggaggggatttgaggtatttgtaatagtcaagacttattctgacagctttttgcttgataggaaaccacctgtcagaataagttcttggatattttaagttagggaattatatacgagtttacagtaatgtagaatagtcgcacgggagttttgttcgtaagttaaccggaaaatggatgaggcagaccagtgtatttgactttgatgtttccttgttggttgttagaaatgataacgagatttcggctcaagttataatcaatagttgcgcatactagttacaaatttcaataacatgaaatattaaaagtttcattaatatattgagcttgtacaatataagcttcgttgtatgtactgcgaccttgatgaataccaacaagagctgattcattatgagctgttgaaacatagatagcgcttccgctgtctctaggttcgcttgtataatcagcagtgtacatttcgccaatcttggtaccattcttgaacgtgacccaaacatttgcacttgtaatttttcctgtatttgcatattggtctcggtgcattcttacaatacaaccaataggaacagatcgtactggtatcatatgtacattagtatgaggtatttgtaataaatcacaaatgtcagtgtcaatagtgcaaaatgcagcatcaattttgccacttgtttgagatttgacacatgagccaatgaattcaaatggtccttcttctgtgataggataatataaagaacctccttcccaaagaaaatgtccagaaacgacaaatcccttacttccatctgacatcgttgctctgtatcctaatgatgcagttgtgtttattctatcttggtatatactttttgagttacgaacaaaggttcccggggaaagttgaaatttagactcaatggaattgtatccagaggcagcttcaaatttaatagcaggagaatcgcttatattttctctaaattcacttattcttttctccgaaaattctaacaacccgataacaatgcagtttttatcttcttggaagcggatgtatgaaatgttttgcataatggagggatgttgagaattttcctgataagatttagttacagtattcattatttgttttaaatatgcataagtgaaagtacatttctttagaatgaaatttccactcccgagtatgttttcgatacttcttttattttcttttgttgtgtcgcttaagagaataacgagttgattattggagttaatataagctcctccataatatgatggataaattatagaatcggtttgcgacctagaaatacggaatgattgcaataaagtttgatatgtctcccctgcggaaagattggcttttgaagcatcattcattgaggggaaattgtctgtacgttccttttgtaaatttgttttttctttgtttgtacacgccgcaagcaaaattacaaaagagattatcaagattcgtatatggattgttttcatagataggtatttatttgaaataatattttctataaagg

SEQ ID NO: 680 - DNA, 1676 bp, Butyricimonas faecihominis
gtctataaaagtctattttgccgctgcctgatttaccgtgatggcaacaaggttcacgatgtcgcttacggaacaacctcttgacaggtcgttaatcggggctgccattccttggaggacgggacccaccgcttcaattcctgcaatacgttgcacgagtttatagctgatgtttccaacttcaagactcgggaatatcaacacgttagctttaccggccacgggactgcccggggctttgctggcacctaccgatgccacgagggccgcgtcagcttgcatttcaccgtcgatcatcacgtcgggagccatttgtttggcgagttccgttgctttcactactttgtcaaccagttcgtttttagctgatcctttggtggagaaacttaacatggcaactctcggttcgattttagcgatagctctggctgttccggcagtagccacggcgatctgggccaattcttccgcggtcggattaggcagtacggcacagtcggcacatacgattaggccgttttctccatattccggtttgttggttaataacaagaatgctcctgatacaacagacatacccggtaaggttttcacgatctgtaacgcgggacgtaacacgtctccggtagcattttttgccccggcaacttcaccatcggcatccccgctcttaatcatcaaagtggcaaggtatagcgggtcaagaacgagtttcaaagcttgttcttttgtcatacctttactcttgcgaagttcaaccaaaaggtctgcatacgcttctttcttctcgtgattttcgggatcgatgattgtggctttaccgatatttttcaattcgaatttctcggccaacgctttaatttcagccggattaccgatcaagatgatttgagcaataccttcagctatcaagatgtcggctgctttcaacgtacgttcttctgttccttccggaagtacaatccgtttgttgcacttcttcgcattttctttgatttgttcaaggagattcatgatatttttattttaaatatatagttactcgcaatcgttagcgcgaaagtagaaataaataatcaatttgtaatgcagacattacaaaaaagttcattttcggggaaaagtttattatttactcttatttcattttccgagcttgaaacgaatacgcaatactccatcattgaaatcgaacgagatgatgcggaacgtgccgatctcggccgtgttggtgacatgaagtccgatgcaggcgcattgatcgtaatccccgatacgaattacccgcacggtctttatacccggttcaggaaggcgggtaaggttgatgcctgccggcacctgatcgatcgggtagaaaatttcttccacgttgatgttttgttgtataatgtcgtttaccgcttgctccacggtggcaatgtcttcggcagaaggtgccgttttgaagtggtaatcacatttggatttctttttctctatatgggcggagaaagaacgttcacaatggaagtatttgaccatctgagaatttagtaggtgttccgctgtgtgcatcggtgcgattgacacatcctgaaattttggggctgcttggcttatttccatcatagacaagtttttatttttagacataaagacaaaagtacatatttttctgatgggtggttatatat

SEQ ID NO: 681 - DNA, 1675 bp, Butyricimonas faecihominis
cctatagattatctatatatggatgtttaagtggtttatttataatgacaaacgagcagaaaaaaagcagaaaatgtatcataacaagagatatagcgggtaaactaaacttggatgaaacttatgtattcatgtggctactttacaagtcaaattgcaggacgggtgaatcccatgtattgagaaaaacactttgtaacgttactggcttaaaaaatgaagacactattagcaaatacacgaacaagtttaaagaattggaattcctagacaagtattccattaaagggtataacgaggaggcgggtaggatcagcacaagtataacttacacgataagcattcccacgatgaactgggtacggtttgatgccagtttattaacggaagagattccaaacaagttgaaggcgttcttggtgttgcttaaatgcctgtgccttaacaatactaatgtcacttcttacagtaaaaacaagatcgctcaactattaaacatggatagaggaacggtaagtaaatacatggaaatggcgataaaagagggcaaggtcatagagattaacaaggtgttttttataacagataccaatataatcatggacttacctcatgtaaaggatagcttcacgtttttagacgggatcgcaagagagaagtacaagattattcacgattattgtgtagagaggaacgttgtaccaccaccgtacgatgacaagctaatggaaatattgtgccagtacaggtataatcgcccagaaccagatttagaagctgcaatttcaaatgaaacagaagcaaactactattctctaaagtataacctatccaagttatgccccaacctaccagaacaggtacatagcttgcaatacttcctaacttccttgataaatagaaagatatacaaggagaggtttgcacaagaagaggtaaaagagaaggtagagttatatctctaattcttgttttcctgtattttcctaagttctattatgtcgtataaatctttaggacgtccagccttgattttgctattaatcaaatcattaaaggctatcacctcgtaagagaaagtttgaccgtttactgtattagttgccgtgtatctttgctcgtaacattcggggaaacttctgccaggattaaaagacgtgatcaattcgatgtcgatgacagggctgatcttgatagatatgttctgttgtccccgtttcacgtcctctggaaaatcatcaaactcgtaacccagttcattcaaggcatctcgtaaagccactagatttgaaggtgtcgtgtctatccaaaaatcgacatcggcagaatggcgttgataaccgtaaaagtttacagctcccccaccaaccattaacatcttcacgttatgcttttgcgctagggatatgaacatccacacgtcttcatcgaaatcgagactcatacctttcgttctaaaataaagttattgctatgtttttcccgcttggtttgaaacttgttaatctctaccattaaacgcaagaagaacaagaacctctcgttaggggttctttcactggcttccttttctcgtctagcttggctttctgcctttgtttcaaaccgtatctccatgcttctcctttgattgatatacaaagttaagaatatatttctaaatacaaggagaatt

SEQ ID NO: 682 - DNA, 1672 bp, Butyricimonas faecihominis
gatctataccacatgaaaatgttttcggtagaggctgagtataaatattcccccaagtttccggatcaaaataccctttataactcgttgcgaccacaaaaggattccgtgcttcaaaactaattcttgcagcacctaaatgtagcttctttgcaatctcagaaggtaatgtataacctagacgaatactacttattctccaataactcatatccttgaaccaataatcgtaatttttaaacgagttaccggaatctccaatattcatccacacataagccatcacagattcaacatcttccattgatccactcactagcttcggatatttacccgaaggattagaaggagaccaaatatctgcagctcttttagaataattcgatcctggcgacatttctgccggacgatagaatggagtttcctgcatagtctgttttataataaagctagaactaatcgttaaatcaaaatttttataatagaaacgattaataaaacctcccgtaaacttgggttccgatgttcctgcataagtatatagattacgaatttcctcgttcgtcagtgttgatctcgttccatatccccacccgatatcatcaaccaaaccatagaaatccacgtatgatactttttctccattcttccagaacatttgtaacccattctcatccaatcctgccgtgttcaacttaaacaaagccccgatagaatgtccctcgatagatggagtccacgagtcatctctgacattaattttatccacattacttacgttgtgcgcgatattaaaatccatcacccaacggaaatcttttgtacgaacgttcaccgtcgacaaagagaattcaaatcccttattcgtaacttcagcccagttcaccgtggaaaattggaatccgttttcctgtggcaatgatctcgttccaatcaaatcctcgctcttccggtaatatccatccacgctgaaagaaatacgattattcaaaactcccatatctaaaccgacattccagttcttagtcttttcccaacgcaaattctgattgggaggtgatgtcacatttataataggttcatcaactcctggcaatatcgacgtgttattccaagtaccaacaacataaggtgaggtattcttatctacattaccctgcaatccataagaaacacgcaatttcaaatttgtcagccaatcagcattttgcatgaactcttcccggttaatattccaagcggcagaaagcgcccaaagaggaagatatttgtatttcttcgcaacaccaaacaaattggaaccatcaaaacgcatacttccgaataccgtataacgattatcgtaagaataagacgctgtcatatagtatgaaagataacggttctcattctctgttttttgatattgcttgaattttgcatcattggcagaacttacactttctggaataattaatggtttcgttgtcaacgccctagaatcaaatccaaatccctttgtatgtatctgcgtactcttattcccacgcatttccattccggccatcacatctaccgaatgtagttcgttaaaaactttattaaactccccttgcagtttccactggtattgtgacatctcatcatcccagttctgaattatgccgccatcaggcaagaaatactttttatt

SEQ ID NO: 683 - DNA, 1672 bp, Butyricimonas faecihominis
attttgatggttatctgtgaaaagtctcttgatcatgtataaaagtaatttattgggtttaatcgtattgtttccggaataatgaaacagggaaagttgttgttacgtgaatcataccttatgctagggacgatacgaggcaatacatgggggtgggtgtattgatggaggcttgtagtttgcctgttgcttgttggcgtgggaatatggtcgatgttatttttgcttattgtttgttaaaatggcggctatgatcgggcgacaatcgggcgacaatcgggcgatggcgcctaattgccgcctaacagtcaggtaacgaccgggtaacaggcagggttaagggtagggaaaccttattaaatcccatgattcccgtgcttgtaaaaagaaaagaaattaaaccgggatgtcatatttttgaaactgataaatgttatttttgtgaagatgtaaaaacaaaatgcgataaatggagaagacggtttattttttggggtcgggtttttctaaggaggccgggggattggttcagaacgagattatcaagactattctggatgaagattttacgcggggaaacgagcgtctgatcaaggccaaagataattttattggttttttgaaggaggaattgcatatttacgaggaccattattgcaacgtgcagttggaagatattttcacgccgattgatcgttgtgtctgggacgggctttctatcgggcggtatagtgcgcgggggttggtggaactgcgggaggagttcaacgcgctgatgggggctgcggtaaattacagttttcagaaaaatagggcttgttgtgattatatcgacgagtttgccgagtatattaatcaagttgcccggcggcgcatggaggatggagtggatcgggtgtcggtgatcacgacgaactgggacgtgatgttcgaccatgccttgaaacgggccatcgaaaacgggcatccggagaagttgagcgtggtggattactgttgctacgtgagttcgtgggaggcgaatgacgacacgattaaaccgggattgcttgccgtggggtatgggggatacaatattaagttgttgaagttacacgggtcaatgaactggtttcaatgccccatgtgccagcgtatgtacgtgcgattcggcgaggaaatcgagatcatgaaggctgcctattgtcggcattgccggaaaaattacgggatgtcggagattaactcgatcaagttgcagagtaatttgttactgccgacttatttaaaaaacttgagtaatatccagatcaagttggtgtggcagaatgcggcgatcgagctgtcggaggcgatgagaatcgtgtttatcggttattctttgcctgctgccgatttcgagatcaggcagttgctggcacggatgattcgtcccgatgcggagatacaagttgttctttatccgaatactccgaacgtggaggccgaagcggagcgttatcgtaatttcttcgggagccggatctctgagccggacatcatgagactgaccgtgccggaatacgtgaagaaactaaaaactaaaagttaaaagataaaagttgtgaagagcgggagcttgggagatacttgttgcttttatcttttattttttaacttttatcttaaaagtggtatttatactctattatag

SEQ ID NO: 684 - DNA, 1671 bp, Butyricimonas faecihominis
aaatggagaggttgtgtcaaaagtcatttttcaaactccctccccccttcggggtactccctctataaacagagggagagttgaaatactccctgtcttcgggaagagtcgccagctcctcctctgtttatagaggaggtggcacgaagtgacggaggagtttttcgaggataaaataccttttgacacaacctcttttttgtttgtcgtgtatttgagatttttgtaattggcagtgagaaaaagaaaagtcttgttattacttcttcttcaattgttcttccaacagggcgactttttcctgttcggctttgactaaccgttcgtaaagttctacaattttgtctattggattgaacgtgtattgacaattttgagaaaagaagtgttcgttttcgctattcgtaaacgtgttaaaatagttaatagttgcttcttcgctcatcgttttcagggcctccgtggaaacgtgcaatatttttgcaatcttatcaagcatttcgtcttcaatttgttctttttgttctaattttgaaaatgcttgttgtgtcatgtttaactcggccgcaagggtttcttgtttaatccctagcatatcgcgaatgcgttttatactgtgtccatggtgtgttttgctcataggtatagtctctgtactcatagttgttttatattcagttatacgggcaaatatacgaaataattgtttattatgggttgtaaattacaccatttcgggagttatttacaaggattgattgtagtttacctgtaaattctcgactttatttgcatgggtgttataaataatcgtttagaggaaatgaaaatctatcagcgtcaattggaagaatgttaccggaaactggaacaagccgagcaagtcgggaaaacgagagaattgcgagtgagcttgggaaaagtgattgataagatacaattaattaatacaatagatgatttgattcataagaaatcggaagaaatgagacggttagtagaggaagtctcaggggatattgatgatctagcgcgacggcatcacatcttttgatatatttcccaactggcgatttttacattttgccatgatggattctactgggggacgagacgattgggcagagtgtggttgtaattatcatgattgacatgtattctctttcgcctgccattctatcagtagttcatctgcaagatattcatcgcttagacaatgcatatcgcctattccttcgcttatcaaagaataggtgtctgaattataaaagaaatcaagggcatcttcgtatgatatatgaagatgatcggcaaacagtttaactattcgggcgtatttcatttgtagtatggtcttatctgcttgcatcttcaattcctcctattgttatttctgttgctttgataaaatgtaaatgatgaactattattttttgatttaagatacataattggtgattgggatattcaaaagataattttcccaatgcatcatctttgcttatagtaccagcaaaatacaggtcgatggtgttaaataccttgtcatttgctatccctccttctactagatcaaaatgttccattcccatccccttgcggcatttaccaacgtaatctaaccactcttcgttgtaactacagaacgttttaattttaaaatcactcaac

SEQ ID NO: 685 - DNA, 1666 bp, Butyricimonas faecihominis
gtattcatccataggctcaaaagattgcatcaagccaaatgaatacctggacaacatatttatcaatatttcattaatcattggataatcaacagacgatacataattaaactcactttgtaacatcgacttaatattacagccgccatgagtcaaattactatctaacaacatcttaaaatgccattcgcttccatattttcttaatcccggattatattctccatctataaaatgttgattacaaagtttttcagtcaaaaaaatcaaaccattttgtattctttcaccatccatcgcatccggcttggggaaagggtaaaaatcaagtggagtctcaataaagcgtaaccaagaatagggatattcaaggtcacttttaagcgctgtcgaataattatatttaagtctcttcgtttcagcatctatataagaactcatgtttctcttttccagtttacttttaaaattcaataaatgttcttccaacacatcaacatctatacgaaacgaatccaataaatatccatgactaggttcataataaatttcaaccgggatagaatccatcatcaccactcttttatcatattttcccacgcacaaactgatgccacttatagcgtgttcatgtttaaaaatagttattcctatctgttcatttattatttccccttgagaaatagcggtattttcctcatcatgaataacaacaagcgaaaaatacgtaaaatccatatttcgaaaaaaagaaaagcaagtcgggggaacacaagtcggataccacaaaacttccggagtaaacaatttataattatttacacaatacgccggttgagtccccaaactatatatcccgcgcctgttttcattcagacgttgatatcccggaactgcaaattgatcaagatgacacacgtcattatcaacaattccttcataactcacgataagatcacaggtatcttccgctgcaagttgcttatcaaccaagatcacaggtccctttctttcaaacgacaaattaacactaccgtttttaattccatttactgtcaaacccgggtttaaatataataacaccggaatttgctcctcgtttctatttacgattttcattttactctcgacagcaacaccttctttacctaaatcacgtaatcgaatttcattagacaatacccgattctttaaaacatgttcatattcaaaatagaattgacgatactcgtttttatttctctcgacacgcataaaattccccatgtaaaaagcgataaaaataaccgataaaatgaatggaaacatagcaaacacaagcacactgcgaacttgatggatattattaggcaaacgcctgtaaacaagaatagacaatatcagaaaacaaatacccattaacaaatagatcgtttgatgcaaaagaaaacacgttaactgtacatgtcccacaaaatcagaaaataaattaggaatataacgagcaaacggatcaaataaattattcatcactccagccccgcatatcgtcgttcccacgcaaaaaaataacagaaataagatacttataccctgattattaataaaacgagaaacaagaatcgacaaactcaggaaataaattagcacaggaaaatttaatgttatcccgtaaaaaaaataatac

SEQ ID NO: 686 - DNA, 1661 bp, Butyricimonas faecihominis
tttcaacttttatcttttagtttttatcttttaactttctttactcctctaccggttcgaaatcctctttaccgacgccacaaagcgggcaaacccaatcttccggaatatcttcaaatgcggttccaggtgcgattccaccatccggatctcctactgcaggatcataaatataactacatactgtgcaaatgtactttttcatagtcttcattgttttaaagtttccaacaaatataataaactcaccagacattacatgaattttttcaataaattcaagtgtttatacgggggataacggaaatggttatcaaaaaatgtgaaagattttaccacggaacgcaaattactgaaaagttcaaaactcgctttcccgtgatactttccgatgccactcattcccacgcccccgaaaggcaaacggggatttgccagatgcacgatcgtgtcgttcacacaagcccctcccgaagaggtccggtttaacacttcacgagcctctcgctcgggtccgaaataatacagggccaagggtttctcccgtttattcacgaaacgaatcacgtcatctatctcccggtaggtcagcacgggcagaatgggaccaaatatttcttcccgcataatcggactattcgggtccacgtcaatcagtaccgtaggagcaatatacttttcctccacgttcacctcacccccgataaccacctgtccggaagaatgcatcaagtgcgctaatctttctgttccctcccagtgaacaatccgcggataatcgggactttcatacgggcgatccccataaaatcgtttcacggccagtcttatggcctccacaaactctgcccgttgatcttcatgcacaaacacgtaatcgggggcaacacacgtctgcccggcattgataaactttccccaagccgtacgacgagccgcaatctccacgttcgcaccacgccccacaatacaaggacttttcccgcccaactctaaagttaccggggttaaatgtttcgccgccatttccataacatgctgtccgaaacggggtcctcccgtgaaaaaaatataatcaaaacgctctttcaacaattgctccaccacatccccttctccatcaaacacggcgacatgaccgggttcaaaaaccgccgcaacaattttctttataacctccgccgttgccggggcaaaaggagacggtttcaacacaacacaattcccggcagagatggcaccaattaaaggttccaacaataattgaaacgggtaattccaaggggcgatgatcaacacaacaccatacggctcgtacatgatccggcttttcgagggccaaaaagccaacggggttgccaatcgtcggggtttcacccaccgtctcaaatgtttcacgtgataatcaatctcccccaacaccataccgatctccgtcaggtaagcctctccccccgactttctcaaatcactccacaaagccgcatttatctcttccatctgtccggtaatagcccgcctcaacgccctcaaacgtcctatcctgcaagcgacctcccttgtcattcccttatcaaaaaactcccgtaaaggaatcgtgtactcctcttttctagtttccgattctaccatatctcaatcattcctgtatcatgttgtta

SEQ ID NO: 687 - DNA, 1658 bp, Butyricimonas faecihominis
atatttagatgctcccgttgagaataacgctcttaaaacagttgttacccaccaatctttttcgatagcattcacaacgattcctgtgcgggattcagcctccctaatatatctttcttgtttttctacaccaagttcttgccatttattcattttatcatttttaatatattaataactatttctcgaatccacgctggatatttttttaaatcatcctggagtaattctaattcattacttttttcaaggacttttttcaattgctcgataataccttcggttacatttttttctttaatttcctgcaaagcaaacacaattagcggcgaaacctttgctttaaaagcgaaatatttaggtgtaactcttctaaaggttatttttcttttaccgacccgaacaatctttgatgcgccagttgtaacataaacagcattcatcggaacttgtgttgatagtcctaaaatatttaaagctaaagctcccgtgggtaaaatttgtacattatcccgttccgcaattgttttggcaatatcatctaaagagggatgcaaaacacctatctctgcgtcgacttccggaagtagataaacccctcttttcactcgttctaaaattcctctcttttccaagcgaatcaatgcttgtcgcacaaccctatcgtttcctaggtcatagaaatcggcaacacaatgcaattttccttgccctttatcaagaattcttttttttattttctctgaaatgcctatttctttctccattaaattaacattttttatatggcaaatatatgcattttttgccatataaaaaatattaatacatggattaacattaattatgtcccaaacgtatactttttttgggacaatacaattattccagaaaatataaggaatacattcatgaaattgtgctgaatttcaagatcatagcaataaaacatacttttataattcttttctcccgaccgcaagataattggtttttgagtgttattttcccatgacgccacaagttctaatcatattttctcgttcaaagaatacagtttacgagtctttctctatatttgcatttctgtatcacgtgttaatttcatacaaacatcatgaaacatcttaatccacagacccagaaaaagcaagaagaattcttagaacattgtcctgaagaagaaagagagtggcactcgatgttgttccggatcggcaacgcaacataccggtatcatctactttctgacagcattaatgatgaaacacgaaaattgtattttaaagaatggctggaaggtctgtcagatccaattagagtggatatgcaaaaacgaggatacgaagagtgtaagacaatgttaccatttaccaggtacatgaacgagagggaagatgtgggcatggatgaatggatgaaggcacacctctccgaggatgattataaattctacaccagaagggaaaaatcagaatgaaatttacattttttatatggcaaatatgtatcttttttgccatataaaaaatgtgaatataagcgataattgggtaatctctattcatgccaattataatttccccaaaaaaggaatattaggcaatcatgctataataccatagcaataggagggagaaaatatctatatttttaaa

SEQ ID NO: 688 - DNA, 1657 bp, Butyricimonas faecihominis
gttttatacgtgaataattagatttttgttgtttaaatgagaaaaattatttatttttacatttattataacaataattgtgcctgctgtgagaatatgctatataatttggtgttttttatgtgtgatttctttgtcggccgaagctcagaaggggaaatattttgaaaaaaatgttcgtttcccggagaaggttacactggaggagaaagtggagatggcagcaagactagtcccgacaaagcaacaattagcttggcaacagttggaattgacagctttcatccattttggaataaacacgtttaccgggaaagaacgaggtgacggtaaggaatttccagtgatgttcaatccgatagcgctggatgcggagcagtgggtgaaggcgttaaaggcgggaggactcaagtccgtcgtgctgaccgccaaacattatgatggtttttgtttgtggccgacaaaaacgactcgtcatgccgtcacggcctctccgtggaaaaacgggaaaggcgatgtggttcgggaattaaaaaaagcttgtgaccggaacgggatgaaattcgggatctatttatcccttttggatcggaacatttcttattgcggggactctccccggtacaacgagtttttcgtgaaacaactgacggaattattgaccgagtacgggaaaatagatgaaatttggttggatgggactaatgagataggcattgacgggaaaaaacaggaatatgactgggaattgatattgaaaacgattcataagttacagcctaatgcggttacggctttttatggtgatgatattcgttggagcggaaatgaaagtgcgagagggcgtgaggccgaatggagttccgtcgcattggttccggggtgttatccggatgcgatcaagcgtaatgaagagatgcgtttaagcgtgttttcccgggatcttgggggaaaagagattattgatcgtgcgacggaattgttctggtatccttcggaggtgtcagtctctattcgtcctagttggttttatcacgagagggaagattcgaaagtaaaatctttgtcggagttggtgaaggtttatttccagtccgtgggatgtaattcttctttattactgaacgtgtcacctgacaagcggggtgtgctttgcgagaccgatgtcactcggttaaaagaattcggagagtatctggaaaagatgtacgcgaaagattttgtttcccggtgggcccgggcgtggactgcccggaagggagaaagtaaagaatataccttggggaagggatgtacgataaacacgattttgttgcaggaagatattagccgggggcagcgggtggagtcgtttaccgtggaagggttggtgaacggtgcttggcaggtgttgggaaaaggggggacgattggttataaacgtttgttgcgtatcccggatatagccgtggagactattcgtatcacgattaatgactgtcgtaaagaggcaaacatatcacgggtgggagcgtttctggctcctaaaatataaacttttctttttagttttcgttttagccatagagagtgtgtccatctgattttagacatacggaagaaattttataaattgagaaagattgtatctttgtgacggaaattaaaagtaatgata

SEQ ID NO: 689 - DNA, 1651 bp, Butyricimonas faecihominis
ctcccaatataatatgttttccttttaacatcacttatttataacgttataaattcacgctcctcgaactcaaatatcaaggaaagagaacttgcttggcaaatttaaaacaaaaaacctgaaagtatagcactctcaggtatattcttttccttaaagacagggactattcctcgtctgcattatttgcatcacctttctctttcgaggaaacacggaaataaatatccccgtcctcaaattcctgggtagcaatcaacacgggtttcggcaaacgctcgtaatacttggaaatctcgatctgttcccgattttcaaatatctcttccaaattatccgcataagaggcaaactcttgaagtttcctacttaactcctctttcatttcaaccgaaatctgattagcccttttaccgatcacggctactgcctcgtagatgttatccgctttactggccaatgatgccggattccgggtaatagtattattcggcgctttaactttcttaaaatctaccatggttaatttgaatattattgttttatctggttattcttcttcatcaacatcatacggtttcaagaactcgttgatgatttcatattttcgagccatttccttggcataacgactttccgggtattcatcaaggaaataataatactcctctttagccgcattataacgttcgtattgtttatcttcaacactatttacagccatctcgtacttggaattgaacaacatatacatgatttcttcccgatatttagatcccgggtaatcctttaaacaattctcaagactcaccacggctgatttatatttttctctcaaatagtaatttcttgcgctcaagtaatccttgtaagacaacttgtccctcatctcatccatgtattcatgaatttgttctttacgagaactgttcgggtaacggctcaaataaagttgaaaactttccattgctttctctgtcacggtctgatccaatctcgctttcggagaagccaagaaattacaatacccgatcatgtataaacattcttccacgtaggaactttctggatatattgaaacaaactgcttgaacaattctgccgcaacttcgtaatctttttggttataactacagaaagcccggtaataagccacactctgagccttggatgttccctggaaaaccatccgaatcccatcaaacaaattggaagctttcgtgtaatctccattattataatactccaccgctttcttatacatggcctgagaatcaccacttttcaagagtttctgatactcactacatgaactcatcaaaattatcacaagcagaaatcctataaaattcttcatcataaagtgccttttttgcatcacgcaaagataaattataaatatcaatccacaaaataatttacaacttatgattgactatttatgatcaaagcaagataaaaactaaaaacaaaaagaggcaagtatctataacctgccacttgtaacttgtactacagtctgtttttctacaaccacataaaaacggactaagtatttaaacgtatttccactcccgaaaccgcaacttttcaaaagaacttatttggaatacatttttttagttacctttgtttccacattgtaaataat

SEQ ID NO: 690 - DNA, 1647 bp, Butyricimonas faecihominis
gacagggagtatttcaactctccctctgtttatagagggagtaccccgaaggggggagggagtttgaaaaatgacttttgacacaacctctccatttttatattaaactaataacgattttcccgtcatttccttgggctgcggaagtcccataatcgcaagaaccgtgggggcaacatcggccaacaccccatcccgcaggtgatcgcacttggaatcggtaacccagatacaaggcacgggattcagcgagtgagccgtgttcggcgtcccgtcctcgttcaccgcgttatcggcattcccgtgatcggcaataatcaacacgtcgtaaccgttagcacgcgcagctgccacggtcttcccaacacactcatccacggtagccacggccttccggatggcctcgtacactccggtatgtcccaccatatccccgttcgcgtaattcaagcaaatgaaatcaacactcttttcattcaattgctccacgatcttctcggtcacgataggggcagacatttcgggttgcaaatcgtaggttgccactttcggcgaaggtaccagaatacggctctctccctcgaaaggctcttcccgtcccccgttcaggaagaacgtcacgtgagcatatttctccgtctcggcaatacgcaattgtttcaatccttgcttggaaatatattccccgatcgtgttcaccacgttttctttatcgaacaaaatatgtaatcccttgaatttagcatcataaggagtcatcgtacaataatacaacggcatggtcttcatcccgaaatccggcttgtcctcttgcgtcaacacgatcgtcaactccttggcccggtcgttacggaaattaaagaagatcaccatatcgcccggctgtatcgttcccacgggtttcccgacctcgtccacgcaaacgatcggtttgatgaactcgtcagtcacccccgcgtcgtaagaggcctgcactcccgcctcggcatccgtcaccggagtacccactccatttaccaacaaatcataagcctccttgatacgctcccagcgggaatcccggtccatggcataataacgcccgatcacggaagcaatcttacccgtggattgtttcatgtggttctgcaactcaccgataaaaccctttccacttttcgggtccgtgtcccgaccgtccataaagcaatgaacgaaagtattctcgatcccgaactctttcgacaaatcgcacaaggcaaacacgtgatccagcgaactatgtactcccccgttagaaaccagtcccatgaaatgcacctgtttcccgttctccttggcataattaaacgccttcacgatctccgggttttgggcaatggaatgatcccgacaagcccggttaatcttcaccaaatcctgataaaccacccgtccggctccaatattcaagtgtcccacttcggaatttcccatctgaccgtcgggcaaacctacattctccccgctcgtgtacaacaaggcacggggattattactcgccaactccgtgatattaggagtcggagtactcccgatcgcgtccgaatgatcgtgttttccaacaccccaaccatccagtatcatcaataaaactcttttcatatctattttatttttgttatttac

SEQ ID NO: 691 - DNA, 1646 bp, Butyricimonas faecihominis
ctgttatcttttagtttttatcttttaacttttatgatagacaggctttcacaaacgccacgaatagaggatgcgggttggttaccgtactcttgtattcggggtggaactgtgtacccacgaaccatttatgggtcgggatttccacgatctcagttaatcccgtgtccggattaactcctgtcgtgatcattccggcctgttcgaattgttcggtgtatttgccgttgaattcataacgatggcggtgtctttcctcaatatcttttgtcccgtaggcctcgatagctttagatccttctttcagcacgcatttgtatgctcccaaacgcatggttccccctttgtctgtaacttctttctgagactccatcaagtcgataaccgggtatttggttttcggggccatttccgtggaatcggctccctccaagtgaagcacgttacgagcgtattcgataacggccatttgcatacccaagcatattcctaggaaagggatattgttggtacgggcgtattcgatagcaagaagttttccttcaattcctcgttgtccgaatccgggagccacgagaataccgtcaacatctttgaatatgtcacacacgttttccacgttgatgtcgtgagcgctgtgtacccatttaatatttactttacaatcgttagctgccccggcgtggatgaatgattccacgatagatttataggcatcgtgtaactccacgtattttccgacgagagcgatggtgactttgcgattatagtttttgaatttgtacaggaaacgttcccatgattccaaatccggctcgtgttttaaaggcaatccaagctgggaaagaacgatttcatccagtttttcttcccgcattttgatcggtaccttgtaaatagtgtcaacgtctatggattggataacggctttcgggtcaacattacagaaaagagcaacttttcttctcagatcagagcccagttcatgttcggtgcgcaacacgatgatgtccggctgtaccccgttttcgagaagggctttaaccgagtgctgcgtgggtttggttttcaactcgcctgaggcactcaggtagggaaccaaagtcaaatggatgaacacggatttttcgcccagctcccagcgtaactggcgaacggcctcgatgaacggtaaggattcgatgtctcctaccgtacccccgatttccgtgattaccacgtcgtaatccccttttgccccgaggagttttatatttcgtttgatttcatccgtgatatgcgggatgatttgtaccgttttcccgagataatcaccgcgacgttctttcgtgatcacgttttggtagatacgtccagtcgtgatgttgttcgcttgggacgtcgggatattcgtgaacctttcgtagtgtcccaagtccagatcggtttctgccccgtcattggtcacgtaacattcgccgtgttcataaggattcaaggttccgggatcgacattgatatacgggtccaatttctggtttgcaactttataacctcttgattgaagcagttttgctaatgaggaagcaataattccttttcctaaagaagaagcaactccacccgtaacgaaaacatattttgttgacacgatataaatattttat

SEQ ID NO: 692 - DNA, 1640 bp, Butyricimonas faecihominis
aacttttaagaataacaagaggtttaataatatttacgctttctttaatatctcctccaaaaacaatcaacatttgcacgaatccaaacataaaccacctgatatttgtcacaaatccaaacatgaaacgataaaatttgtcacaaatccaaagtaagacaagataaaacgtcgataggaaaactaccgacgctttactatttaataaatgaattttatcgtgttactgccgctttcttcgcatccaaccgacgtaccactttcccgtaaataatcagggccacggctgataccaaagcaattgccgcaaagtaataccagatgtaatgcgcatttgcagaggcagccatccaatcggcctcgctactaaataattcacgggcagggcaatatttactcagcaagaacccggacaacccgaacccgaaaatggatgacaaaaaggagtgtagatgactaaaacccaaatacattccttcttctcccttcggtgcttgtaaagagaaatattccaagaaacgaggagaaataaacacttctgccaatccttggaacacgattcccacgatcatcatgaaggccaccggatgcaatccaagaatctcaccaccacccaacatattcccggaagccatacacaaagccgagatcggcatgatgaacataccacaagtcatggagaacaaagctgactttttacgcatcagcgaagtcaccagattcaccgtcaacacgaccaccaaaggattcacgttagcataccacccgatggcacttgcctctcccgccaaacgggtcacgtatttcggcatcgtggcatacaactgatgttgtaccatccagaacccggtaataatcaagatcaaaacaatcaaccgtccgttagtacaaactttcaccaaagccgtccatatctgtccgaaagtctttccctccccggcatgtttatcactcttgtaaaataaataaatcgcgatcaacgcaaggaaagtcattcccgcagagaaataatttaacacgatcatcccctcatgccccatggcatcacgtaacggggtgacaagaacctttccggagaaagccccgatattcaccatcccgtaaaaaatagcaaaccctcttgcccgacttttctcgtccgtctctttggccaccgtaccggaaatcacactcttgatgaatgatcctcccacaataatcagaatcatgatcggaataatcccgtagcgataaccgctttcctgcaatcccgtaaactttgtcacgtaaccgtactctaccaatcccgtcgaagccagaaaattcgggaataatcccaaacccaaataacctaacgacaataaggtaaacgccaataacatcgacttacgaaaaccgatcttatcggcaagcgcacccgaaaatgtcggcaataaatacaaacaagcggaaaaaactcccgcaatagtagccgcctgaatatccgtgaatcctaagacgttactcaaatataacgtgatcacgacgaacaccccgtaataagcggcacgctctaacaattctaccgtgttggcaacccaaaacgctttactaaactttactttctctttcttttttgttgtcacactcatactatcaatttattactaatatttacacac

SEQ ID NO: 693 - DNA, 1638 bp, Butyricimonas faecihominis
aggtattataaatatgtcattttgtctttatgttttatagaatatatgacaaaatggcttaattatttacattctttccatccccggaatgtgtcactaaacgggggataagcgatccctttctccgtgataatagccgtgatcacctcggcaggagtcacgtcaaaggcgggattatacacgtgaatcccctcgggagccattcttcgggcataccatttctctgtcacctctgccggctctcgttcctcaattttaatctctttgcccgtgggacaatccatatcaatggtagacgtcggccccagcacgtaaaacggaattccataatatttagccaacacggctacccccgaagtaccgattttatttgccgtgtctccattggcagccacccggtcacacccaaccagcacggcctgcacccatccctgtttcatcaccgaagaggccatattatcacatatcaaggttacatccactcccgctttctgcaattcgaaggccgtcaacctcgccccttgcaataacgggcgggtttcatcggcaaaaaccgaaaaaccgaatccttgttcctgtcccaaataaatcggggccaaagccgtaccgtattccgaaaccgccagatgccccgcgttacaatgcgtgagcaagcccatacccggtttcaacagtgacaatccatgttctccaattttccggcacgccgccgcatcttctttccgaatcgcctcggcctcttcccgcaagacttgtttcaaaacttccacccccgcaccttgacatttcaacaacgcgacttccattcgctccaatgccgtaaacaaatttaccgccgtgggccgggaagatgccagataattcttcacccttgcaaactcccggtagaaatcaccaacctcatccaccttttgcatacacacggaaatcccgtaagcggcagccaccccgatggcaggcgcaccccttacctttaacaaataaatagcctcccaaatttcctccggagttttcaacgccaaataaacttcccgttccggaagttgcgtctgatcaataatcaccaacgcacccagctcataatccgcacgcgcggtcacgatcgtaaacaaatccatgttgaaaatagtttttcgcaatattaacaaaaaacatttacagtaaccacatatttcctcacagattacaccatactagtattgtcctttcgtctcactcttttttactctccttatccaccagcgcatccaaatcttgcaccaaataatcatctttcacccggtaaagaagattttttcgtgtcccggagaaaggttgttcaacccctataaaaacctcgctctttccaagttcctttagcacgtaaggctggaaaatatcagccacattctttatcacgtgccgcttggataaaaaatatttagccgctttttcttctacataaccatttctcgttatcacgtaaaatgtcgagtctgtatcgaacacaaccccaagccggctggataacaccccatcataataaacaagagcctgaaactgataaatattatccaattctaattgtacagccccatatccttcctgccattcataacaaagatgatatttattattctgaaaatagtacgtaaatcc

SEQ ID NO: 694 - DNA, 1637 bp, Butyricimonas faecihominis
atattaaacattatggatgtacacacaacatccgttatcaaaccgcaagttgcgccacaacttgcggttttattttaaatcacttaccgtgatcacgtcccctttcaaatcaaactgtaccgtcgcagtctctccaatcaaatgcaacacgtccgccacgtctgtgaaatgagcgataatccccgtgaaacgcttccctctcacgtcgtcatttgcgtagaaaacctccgtgtcataccagcgacacaaacgatccatgatctcctcaatcgtctcgttctggaacacgaactcccccgcccgccaagccgtgtagtagtacgtatccacgtccgtcacctcgacttcttccttttcgcaattaaactcggccatctggttcggttgcaggatgctttccgcccccgtcgattttacccggatgcccacttttccctccaccagcgtagtcaggatcttcccttgataatgcgtgttcacgttaaacgatgtcccgtacaccttcacctccataccgtccaacaccacatagaacgggcgttccgcgtccttctccacctcaaaataggcctccccggataaaaagaccgttctccgctccttcccgaaagccacgggataacgaatctccgaatcggaattcaaccatatccgcgtcccgtccgacaacgtgagagaatactctcccgcccggggaacgatcactttattatacaccagctcctcggcctcccgtttcgtgtaaaccagcgattgcttttcagcttttgccagatttccctcgattccggtttcaaccacccgagtcgtgtccagaaaataggttctcccatcatgtaattccaacacggcacgcccactacccggttgcacccgctgggcaatcaccatgtttttctcccgtcctcccatattcacccacatcccgacagcaatcgccaagggcaaaataaccgccgcagcataccacacgcacctcaacgacctccggggtttcacgttccccgtcatcacgcggacccgtcgcatcaactcgtctttctttgccgccaacacgtctcgatccaccccgaccgtgacgtccgtctctcccccttcaagcgcccggcggtagaaatcccgatgccgggaagacaccgccaaccagctttccaacctctcccgctcctccccggacaactcgccccggaaacttttcgaaatgacttcccaatcaatatgtatattttctttctccatgacttttcatcttcattacaccctaaagacaaactccccctccaaaatgtttacaagaaaacgaataatttttcaaaaaaacagtctcagtcatgaataaaaatacctacaacactgataacaagaatattaaaatcaagtaaatattttactttccaaacaaatcacatccctataaatacccattcttcacggatacaatcccccgttgcctgcttgttgcccgacagataggcggtaaataggcgccgtcgccccatgctcgcccccttgtcgcccgatcatcgccgccattttaagaaaagaaaaggatatttaacttgacaaacggtcattcctgtcgtacctttatccacctatttagttaacaacacaaatgaaacgggagagtaataggt

SEQ ID NO: 695 - DNA, 1629 bp, Butyricimonas faecihominis
cttatacatatctattgaatcactctcgttactgttgtaaaaatcaaatcttttatctctccgaaaccggtaaacgtatgtgaagtcacgaaatcccccgcctcgtccaaaattacctcatgcaattcacccgcacctgccacattcacgacaattcccaagcaacggtacggggaagaattatccggaaaactagcatcagcatcagacctgaacttcaacttcgtaatcacgttgcccgcatcatacaattctaccgattctttacttacggtattaaataagaacaccttactctctttcgtgtaaaagaattgttctgcataagcggaagacgtggcaaaacaagtattctggtcaaacccgagttctcccaaattcactctcgtcaccttgatcggggactcttcggccctcattgattttcccttatcactagcctctatataaaaaatatagcaggtatccgtcatcacgccaatagctgttgctccggtctcttcggaccccgaagtaactccttgccccaaccataaaatctccatcaattgagtcgtcccgtcaacaacttcggacaagccttcaaccggaaaatcactgatctctaccgtatttgactcaacagcattttgcgggtaactcccgtcggaactcgtaacattataacactggttttcgacaggatcaaacgacataaatttccgattcgttttatcccaaatcgtggtaaaacccgtttgactcatataaatcttgtcgatcacgtaattctgcacgtcgttttcagccaaaccggaaaaataatatccactcattcccgaatgatagaatttaccattatcatccacggctatagcataacggcttaagggatgggattcactataaaccaaattattcgggttagctcccggtgcaaataacgatctggagtctttccggtcttccaacacgaaaggcaacatcaaagcaacagaatcccgctgaataacatataaattttcatacttatcctgaccatccgtatgagtcaggaaagccacgtacgacaaagcctccgctttttggaatcgttccctgttccacagatccttataagcatcataactgataatcgggttcgtggaatccggttcctctacggtagataacttcctgttgttttccgggccattcaggataaaccacgcattcacgaacggcactttcgtagtcatggtaaaatcacgataatgatcaacccccgtcctcttatcactcagccggaatttaacattatatctggttgttttcttcggaggataagtcagttccaattctttcgtgaacacgctatccacaacattctcagaaccatccttgtaccccaccgtccataaatactccacgttatcctctccttccaccatactttgggtaaacaccggagaataagtcaccttcaattcttcccgtgccggctggcgatactcgtatcgatacgtatttccttcttccacggtaatcggtgtaggcataaacgtaagcccgtcaatcgtgtttatatctttgtagtcgtaatttcctttatcatcataacatccgacaagaaaccacgcgacaaatccgactataaatattaatcttttc

SEQ ID NO: 696 - DNA, 1628 bp, Butyricimonas faecihominis
ttcctctgtcggtgaaattacaaggtgaaccttatataaaataatgaagatgagagtgtggttaatgttgtgtagtcttgccgtcttgagtggctgcaagactacccctgttgcggagattcatttgaagggacgtttggctgatatgggaagtcaggaagtcagtatggaatataccggggtgactggagatttcggtactggtaggaatgtgatgttaaagacggatggggaggggtattttgatacgatccttccgttgagagaaccgatgtatttcaatatcagtcgtaacattctttacctttcacccggtgatgatttggaagtttacttgacaccggatacccgtcaagcgacttttaagggaaaagggagcgaggcgcagttgtttttgaaagatcggctttatcccaagggaggctcttttcttttgtccggacggaatgtaagggagaattttgagaagacgaaagaggtggtggatgcgcttgcggcttctaaattggctcaactggatactctaaagggggtaacggagctttttaaggagaatgaacgtattcgggtaaaggcgaatttgttgaatagttatttgacttatgctctgtataataaagaaaatgcaggagcgtcacgggaggaacaaaggcaatggtacgggcgttttattacttctgttaccccggatgtaaatcaactgatgcgagagattacgaaaaacgagtatttggatattatagatgtcagggatgtgatcgtgtataacttggaccaagcggaattcatgcaaggggtggagattactccggaaatgcgggaaatcaaggaagctttacaagttttggcgaaattggattcatcaacagatccggaggtgattctgagcatggaggagaagacaaaatcttttcagcatgagggaattgtttctgaattacgggagaagatccgtaatgtgaaaagtctgatgacgggacaaccggcccacgagattatcatgacggatgttgatgggaatgaagtcttgttgagtagttttaaaggcaaaaatatttatttggattgttgggcgacgtggtgcggtccttgtattcaggaatccccggcatttgttgcgttaagtgagaaatataaggataaagatattgtctttattcaattgtcaacagataattccagaaagacttggttgagttacttgaaacaaaaggaatcggtagtgactcagtttaattctgtcgataacgaaggattgagagtgaactggcaggtcaagtatattcctcgttttatcttgattgacaaggaatttaatattgttgaatcttttgccccgaggccttctgatccggaaattaccgaacatttggatgccttgcttgcaaaatgaatgattattgataagtaaaagtaattgccggattttcttccggcaattattttttccggttgatactcgtactttctcattaggaatgctttatttgcggatttagggatattcaataaacatttagtgcaaattaatgtaaaatagtgtattcaaaatgtgataatacagttatcatattgtaagccgctcccattccgctcccattcctcccctattcctctcctattagaat

SEQ ID NO: 697 - DNA, 1625 bp, Butyricimonas faecihominis
ggatgtagaatatcctttaattatgttacaaagatatataaccttcacaacatttccaagtgaagtgcagggaaaattttacatttgttaagaaatggggaggggataggttttattgttttttggatggtgtgattatagaggtttgatgatttaacaggctaaaggatgattccccttgtttgccttgttgacagataggggttaagcacaagataatgccttaaattgtagcactaatctcccaccttgttttggagtggcaaaacaagggttctcataatgcttggagataagaagactggtttaaatttccagtcctctttctccatttgtcttgtcactgtttagcaatagagcgttcgaatttgttacttaaaaaagtgagaatatcaaaaactttatctccatctaaaccttgaatatattcaacctcttcttcagtaagagtatctagcattgataaagcattattaacacctatactctcttttgttgtgggagatttgaccgtggtaagttttacaaacgcatcaataaaataacgtttaccgatctctttttcaagtcccaattcttggagtttagagatgatatgctctccaatttgtaaattgtactgaattgctttcggtagtattccgcttgtacttctactccattgtacaggagtaaaaatctttcctagagtgtagtatttcattgtagtacttacagggatcttcaaatctatactaacttgttgcactttttgcaacaattcatgttgtgtcgcaaaagaggcaataacagccttttcacagccttttagggttttgtccaaggcagtgtttgtacccatgtactgggcacatttttgtattgtctcaaattcttttatctgaatattagatatgatagttaacggtttatcttcaactagagcttcttcattctcccagtagatggcctgcatcattctctgttctttgtgatttccgatcatgatgtacgcatcatttaatagttccttctcaacaggaacaccattgagagaagttaatgtgatattctctttagaaaacaggtctgcttttgtcaaatatttggggaagtcccgttcaaataatttgtcatttattgtttccatcgtgaacttgtcttttgttgccaagttgatgaatgcaggagctgcgacaatataaattgttttgaaaaatctttttatgaggtaatctccatcctcagtttctgcaggcatccattcttccactggtaagggaagagggtgttttttcaattcttcttttagagcctttttggctcgcgcaacttttctcagtgcgccttttttcctctcctctttggcttgctctaatttttcttttgcttttttgagttcttcatgtagactcttgattgtatctgataagttaaacatatcaatcaatttttccaatgaaattttcatggtgttactttttaaattatttatttccatgttattaccctccaattcttttttgtgtgtatccttgtcttccatgctttctggatttaaagtgttacttactaattttgcctcactctctgtttgttggttattaccaacgattttattattattttctaacatagtattgaaa

SEQ ID NO: 698 - DNA, 1624 bp, Butyricimonas faecihominis
atattttatatttcgtgcgatccagtagaaaccttcaacattatagctagcgatggtgatttcatcttttggagcatagggaatatcttgtttccaaggtgattgaaacattcctgaaaagaattgatgattactgatgattgtgataaatggtaatataatccaccattttttatggatcccccaaaatactaggagatataaattgactaatataattcccggcatgaatagaccagataatgcaggaatccaccatttatcaggattgatacatggtgcaaaaattccacatacgcccaagaatgtcattcctagggttgctggtttcattaacaggtaaaagaaaaaccttagtgcggccatttctctttattagggataaatttatttgtatattatgtggcaaagttagcaatattgttattgtttggatttattttgtcttttttctgcatctcatcaagtacctttttcatttggttattccatgaaagatgtcgaatcgaatttcttatttctaaaggcgtgatatgcaattgattgtagaaattgagtatttgctttatatccacagcttcctcgtttgcgggaattttcatgatataaggcatattttcaaaatcttcgtctatttctgaatagatgaacggaatacctctagctgcatattctctgtttttaagcgttttaatatttgtgattccactacgatggcgtcccaaactgccgattccgaaatcgcatagttcaaaaagaaggtcaagcatttgtccagcttgccgtccatgcaggataacatagggagctaggtgattctctttgatgatagacatatattcttcacgctctcttaggctaaaaaaatctccaataatatgaaaatacactttgtattggggagcatgaatgtagtaattagcaagacccttcaacaagcggtcaaatccgtgccaatagtgaatctcggcgaccccgattaaatgaatttcttgtgaagtgtcgtttgcttcttgttttacggggatgtccttgaaatcaatcccattagagatttggagtgttgggattccgaatatcgttttgtaattggaaaaggtgataattcggtctaagtatttagcaagttgtttcctaaaacatttgtcgataagtagttgtatcttccctttggatagaatgtattcttgatcgtacggatacgtgggaatttccataaccacatggattccggctttttttattttactaaccagtctaattgtgaatggattggcattgtggtccgagcgaatatataccagatcaatctggtttttaataatgtagcggaagaccgaattgaattcaaaacgtttgtatagttttccttttataccatctccgtaatctgccagaatctcttgatctagcatacggtattttattccttgtttttccgataaataacaaagatgggtctccaccccgttagcttcgagtgctcgtacttgatagtggatctttttgctaattccattggtggcgtgaaagccatggaacgtgagaaataatgctttcatgctttgaatttaagtagtttcaccaaattgtattcttttgtgatatgaatataggttagatc

SEQ ID NO: 699 - DNA, 1621 bp, Butyricimonas faecihominis
ttgttatattctcctaggtaataactggtccaccaagccggtttcgccaatttcccatctataatggaaaggcaataatgatccccttccatcggtctgaaatagtcgttctcccgaaacttcaaataaagaagaacaggatgattcatcaggtcctccgtccgtttcaacttcaagggtaacacgccttccacttcatttttaggaatgatcaaagtaccaaactcataatgtttaccgaattccgctgtggttgaatcctccacgacttccaactcaaaacattgatcctcatcaacagacattcccatactcttcaccggaatacgatactccacctctttctcttcataaattgcgaaactgaaaaatacagtatcgggagccacgttagaaacatatttattaagatcccaattaaaatagatacttctcttctggtccggattgtaatagatagccttgttcgaacaagctcctaacagaaggaatattcctgtatatatcaaatactttgtcatcatacgttttctaattttataatttaacgaggatcaagctcttccgtgggtaaaggcaaggtgtagattctatcactcccttttaaagttgcacctaacgcatgaacataaatatcccgattcaatctttttaaacaaaaccaccattgcccttctccaaataactcttttctccgttcattcataatatcatccaaagtaatatctttacccacatcccgatctgcaaatttcaccatacctctagccgacaccacggcattcaaataatctcttgcacgttctttatctccttcccccaataaggcctcagccataatataatacatttccggaatacgaatcatactaaaaccgaaatatgcacctccggaatattcagaggcatcatttgattcatccatgattttgacacaaatatcttttgaattccctgtattttctttagaaagaaaccaagcagataaccgtttatcttcccccagttccggtccttctgcatttttatataataatttccagccattatgaagaatcattatagttttcgcagcatgtctatcatacaaatacgaactaatattcgtcgtatataatccccaaatcgtctcggacaaagaaatgcgtctcttcatgaatgtcgacaaatcctcttgattcacaaattggaacttttccgattgaattactttattcgcatacttttttgcgttttccaaatcccctttcatccaatacactctagctaacattgcttgcgctgcatacaaattaaaatgtaattctctggctcccgtaaatcccttttctccacctttacgaatcttcggcatcaaggtctcatcttcagccaaacaagtttcagcctctttcagatctgcaatgattttctcatacacttcttccactgatgaaaaaggagttactttaaaagtatacttcgttacataaggaatagcctccgttttcgcattttcatccgttgaattcacgtgaacagcaaacaatcgcaataaatcaaaatggatcgccgctctcaatcctaaagcttctccacgatataagtcataatacttaaaatctttcacactcttctgatc

SEQ ID NO: 700 - DNA, 1620 bp, Butyricimonas faecihominis
tcgttaaagatcgtcatcaacacctccagaacgccgcctccacgtgaactcgactgcctctttcatcctccccctgtcccgttttagcgggtgcaaagataaggtaaacatttacccttttccaaacttttcaaccactttttttcaaactttttcaatcaacgctggaatccagacttttacaaccggaagagccaggctagaaccctaacgggaagcgggaaaaagcgagaagaaaaactagaaaagttaaccactgttatccgtgagttcaagttaaggaaacaccattgtcatgcgatcacgggattcactatctattttagataatctaaaattcccctctacctacacccggaacgagaataaaaatagctttctccgattcaattccacaccaatcaaagaggactattccctcatttttttcagcgaagtttcgttcttcaaacacacgatttctctgacgctacatattcgctaatttctctttacccaaggcaaccacatcatcaacggcctctccctcgtgacctaatcgcctctgataggcaagcaagcgatccatacaagcttgcatgcgcgacttgtccgttaatcgtgtaaacaaataacgaaaaacggtcgcacggtacaaaggcacatcaatcaggaaattacaattctcaaataccataaagcgttcatatactttatctgtatcctcgtcaagcatagcttttatcactaacagttcagccgatattttgggaaattccttcacgggatatttacttgcctccaataattgatcaaccttgggcttcaacgcaagcaaagaatccggattttctgtttgagccatctttaaatttatcacggtggtctcgaatctcagcctctcgtataatagattttccaatttgtaataatctttttctactttcccgaatttttccaaatgttcaaggatgaaacgaaattcccgactatatggatctctccaaatgtaacttcccaccataccccaaatatccggagtccataagctatccataggaaattgagcggcataatcaccggccacctttgcatagttgtgctgatctcccacacattcaaaaaaccacaaatatctttttacaagatccaattctcgatttccttgccgatactccttttcgatctcgtacaagggttttcccaataatccttttttcaggttatctaataaatcatcggcctcccgtgcccctcttaacacgtgcaagaggtttccatgcgaatcggtgacaaacatggtaggaaccgctaatatcttattaggatattgatcttcaaacgctttcccgttttctttctctatgtcatattttacacatacgaacattgagtccaagtaatcacttactattttctgaggaaaaattacattcatcaaatgtttacaaggaacacaccacgaagtgtaacaatccacaaataccattttttgagccttttgagcttgctttagaaccttttcccatggttcattatccaaaaatgacactttcttttgtggaaacacactcaacgtgatcattccgaatacaaatgctaataatatctttttcatatttttctacgttaatgttattt

SEQ ID NO: 701 - DNA, 1615 bp, Butyricimonas faecihominis
ttcttacacgaagaaagagggagtgacaattacggaagtggaaagagatttgttcaaaagtataaccaaaagtacggatttatactaccacgttttcctcttaatcactgaaatccaacgtcgtgcatttttaaaaatagatgctgcccgtaatcggaaacttgcatcacaaagagagttaaacccgaacacccgctttattgacaacccggtaatcaatcaaattgccaataaccgaaaattcaagacctatgtttccacgaatctggtttctttgaacgagtgtcaagacgtggtcgccttgctgcatgaccgcatgatggaaatggattttttcaagctttacatgtccaaacccaacgtgacttacgaggatcacaagaaactcgtgcttgacatgatctcggaattaatcgcggaagatgaagatttcgaccaagccatggaagaaaagaatattttctggaatgacgatttcgaactcgtgttgagcatcgtgtacaaaacggtgaagaatatgaaagaaagctattcagaagacaccgttttctttatctccttatataacgaggaagaagacttgagttttgcgaaaaccctgttccggaagtccattctcgacatgaaggaaaacttggaattagtggatcagttcactaccaactgggaactcgaccgtatttccgacatggataaactcatcatggatgcggcaatctgcgagctgaaatatttcccctctatccccgtgaaggtgactctggacgagtatatcgagatctccaagaactattgttccccgaaaagtagcgggtttattaatggtgttctcgacaaaaccgtggctcttctgaaagaaaagaatgaaatcagaaaagtcggtcgaggtttgatggagtaatactaccccctccagctcccccttacacagggggagagctgattaccgggcgattttcctcccgtgtaacgagggttagaggccgtagccatttcacaaattcaacttttgggttactccttttctgttcatgaatttcgtttgaatctatcccagaatgttttccgtttttctgtctttggtgttttcaagcgattcatttcctttctttcctgagaacgtcgaaatgccgtcttgatacgccattccacttcttgcgagttacgagttcctttatcaatacactcatcaaccccctcattcaaaaggctgtaatccggcaggctgctatacatcacgatggcaatatcatctcccgcttccctaacaagacgcatcacttcttccccttgcattttcggcatatctccatctagaagtaataaatcataacgacctttttgatattcgtcccaagctttctgtccatcctcaaccgaggatacgttaaatccacactcttttaaacgcctaatttcaaatttccgtgtaaactcatcatcttccgcatacaaaatcttaattttcatatctcacgtatttagttattctttcaacaaaggaaagttttatttttctaatataaagaattcaaatatgataaaattatgagaatttttagaaaatagagatccggacaccccgacctatttcaacattgtctcaccgtagtct

SEQ ID NO: 702 - DNA, 1613 bp, Butyricimonas faecihominis
atatttaagtttaaccaattatataaattttggacacagattatattccccttgccgggcagatttttacaggtgcattcaccctcatcgatttaattttcgtcattatcctattgcttttattattatgctcggcattaatttccggttcggaggttgcctatttctcactttctccctcgcaattgaaatacttggaagacaacgggtacgagaaggcccgcaacctgcaacagaaacccaaccgactactcgccacgattttaatatccaacaatttcgtgaacgtggccattgtcgtgctgtccacctatctggtaaattcattatttgatttctcggcttatcccacgttaggtttcattatccaagtgatcgtggtaacgttcgtgatcttactggccggagaaatcattcctaaattatacgccaatcgttcccagttgaacatggtgattttcatggcaggtccactgacctttttatcacgcctgttccgtccgctatccgccctgttgatcggttccacctctattatcagcaagcgcatggataaaaaggacaatttatccatcgaccaattatccaaagccttggaattaaccaaggacacggcaatcaacgaggaaaaagacattttggaaggcattgtccgttttggtaatattgacgcggttgacatcatccgtccccgcatcaacgtgatcgccattgacgggagttcaagctaccaacaagtgaaagagatcatcactgaacatggctactcacgtatgcccgtgtacgaggaaaacttggataacatcacgggaatcctctacgtgaaggatttattacaacatctggatgaaaaagaggactttcactggcaaaccttaatccgtccggcctattttgtcccagaaaccaaaaagatcaacgacctgctggaagagttccaaacgaaaaaggtgcacttggcgattgttgttgatgaatacgggggaaccaccggaatcgtcacgatggaagatattatcgaagagatcgtgggcgacattaatgatgaatacgacgaacaggaaattgtttacacgcgggacaagaatggggcatatattttcgaggcctccacgctgttgaacgatttctacaagatcacggacatagaggaggattcatttcaagaagtggagggagatgctgacaccttggccggactgatccttgaaatcaagggggaacttcctcacaaggacgaggtgattacatacaaagaacatcaattcaaagtactcgaagttgacaacaggcgaatcaagaaaattcaatacaaaaagaccgggcaagtccctctctcgcctataactgccccgccgataagctaggacaagtactctgcaaatatacaccccttacataccatgaacaccggttcatgttcatagtatgtatatgctatgttcatgctatgtccatgagctagactatcggcgggggaagggattgtattgtcctgaaaaaagtttacagtaaacttagtaaaccaatgtcagaattaaattttccccctgttcgtcgtcgttattacgccgtgaagacgaaattatcagcggtacgagatcgaataatca

SEQ ID NO: 703 - DNA, 1603 bp, Butyricimonas faecihominis
gagtatatttcataattaaagatttaatatgatttttattaacaaacatactaccacccaggattttggacaagactagacattaatacttcttcagcctttatcggaaataaataatcacgtggcgctgtaaatttacatttactccacacaatcacgggaccattataatcattataaaacgcttgtgcattttctcccaagacattccaaccatattgtttctcgttcaattctatatgagcagttttccaacgacgcaaattccaaaaacggtgtccttcaagagcaaattcaagattaatctcacgctgaataatatcgcgcatcccatctctattatccactttctccggattattcgaatacgacttccacgctgtaacaacatcaggaattccagctctttcccgaactttgttaagcggagagtaaactctagcatctggtttttctaaatactcgttccaagcttctgcctgcatcaagtaaagttctgctaaccgaataataggcaatgttctattagcactaaccacatattcttttgttgttaattctgactctaagaattttttccaccaatatccgtttatattttgagcaacagtactagaaacgatgtcatactgagaaccaaaactctctcccttataagcctcaaccgttaaattgtaattaatttcttggcctttaggccctctttgccatttcgtgcgatctgccgcaatacaagcataaaaacgaggttcacgccgcaaatgcaattgcaaaacatcagcattcgtcaatacaatatcagtataatcgggatcactttccattcccatataataccgagaagaataattccatgttttatccatatctatcggtaaccctttatctgtataatacatttcaaccattttcaatgagggagataaactcccaagaacggctgagttaaaatgttctgtatcttcaggccttagacgaggaagtagtaattccgagaaacccgcaacacttttccattctaaaataaattcttgattatcaaaatctgaaataacacttttttcgatatcctccatatgattcagaacctcagaatgattactaatagtaccggaacacaatgcatgtcctgcttccactgccactcttacagcctcatcagcagccaatgccgccaaatgccacttctcatgatcatagctcgtgctaaaaagcggcttaccttctttatccaaaaaatcagaataaaattcatttccattaaaaagcggagatgccgcataaagtaaagctctcgcttttaatgccaatgtcgcctctttactaaaaaacggtttacggtcaaacggtttttgatttcctaataataaatctttagcagcttcatcacacaaacgcacgagcgcattaaagcaagtatcaacatgaacacgttgctggcgtaattcagacatatcaatatctacggaaagattcttgggaacaagtacaatggggccataatgacgcactaaatcaaaatacacataagcttttaaagcttttgcttctgccttccattgccgtttttccacatctgtcatattatataccgcatctatat

SEQ ID NO: 704 - DNA, 1601 bp, Butyricimonas faecihominis
gatatgaactttttatcattattcgttctgataccaatactcacgatgggcgggttatttctttcaaagaacctgcaacaaattcgtgtagcggtggccacgggagcttccctgttgctggccctagccgtcgggttggtatttgcatatttaggagaacggggagccggtaacacggctgaaatgctgtttaccgccgacacggtttggtacgctcccttgaacatacattattccgtgggagttgacgggatctcggtagccatgttgctgctttctgccgtcatcgtcttcacgggtacattcgcgtcatggaaaatggacttcctgcaaaaagagtatttcttgtggtttaacctgctggccatcggggtattcgggttctttatctccgtggacctcttcaccatgttcatgttttacgaggtggccctcatccccatgtacctgctgatcggcgtctggggtagcgggaaaaaggaatacgctgccatgaaactgacgttgatgctgatgggaggctctgccctgctgctcgtggggattcttggcatctacttccactcctcgacgacgggagcattcacgatgaacttgcaggaaatagcgcaggcccacgccatgcccgaaagcctgcagcgctggttcttcccgttggtattcatcgggttcggggtccttggagcattattcccgttccatacatggtcacccgacggtcacgcctctgcccccacggcagtctccatgctccatgccggggtattgatgaaactgggtggttacgggtgtttccgggtagccatctacctgatgccggaggccgctaaagagctttcatggatattcatcatcctcacgggtatcagcgtcgtctacggggcttactcggccatcgtgcaaacggacttgaaatacatcaacgcttactcgtccgtgagtcactgcgggctggtattgtttgccatcctgatgttgaaccagacggccatgacgggagccgtgatgcagatgctttcccacggtctgatgacagccttgttcttcgccctgatcggaatgatctacggtcgcacgcatactcgtgacatccgggaaatgggtggtttaatgaagatcatgccttacctcggcgtgtgttacgtgattgccggtctcgcctccctcggtcttccgggattaagcgggttcgtggcagaaatgaccgtgttcgtgggagcgttccaagaaacggacactttccaccgggtattcacgatcatcgcttgcacgtccatcgtgatcacggccgtgtacatcctgcgagtggtcgggaaactactctacgggagcgtggtcaacgagcatcactatgccctcaccgatgccaactggtatgaacgtttttccacgatcatactgattgttgccatcgccggaatcggtctggcacctctatggctctccgacatgatccgggcatcgctcggctccgtgcttgctgccctacaatgaacacgggaagataaaagttaaaagataaaaactaaaagtagaaagataaaaatgaaaggtttcccgaagacggtgagtattccaactctccctctgtttatagaggg

SEQ ID NO: 705 - DNA, 1586 bp, Butyricimonas faecihominis
atcagggaactgctccataagttgagataattcttctgatttatttctactaataccataaacgaccacatttttttcacccaaaagacttcttacaatttggactcccaagcctcttgaaacacccgtcactaaaaaatttttattactcataactttcgtgatattttacctgtccttgtaacattgagttgttccacgaatttaaaaattcgcggaattttaaattcttggagtttctgccgaagttgttctctaatcattttttctgtaatattctcattctcccttacaacatcacaacaaacgatctttcctaaaattttactatctttcgcataaacataaacatctatcactccttgacattctcgaatacattcctctagttcatggggatttaccttatatcccccaacattgatcatctcattctttcttgaaagaaaatggaaggtaagaggtatgtcatgaacaatttcaataatatcacccgtgtgataccagtcaccatcaacatccacaagagaagacttccccaagagagaactatgaattaaaagctctccattctccacacggaccaaatttttcatttcttctttaattacaaattcatttcccgcagaagcaaatagcgttcccgcttctgtagaagcatatacattcgtcaacttagcattaggaaaaagaccgattaactgatgaagagtatgttcatcaaacttttctcccccagaagttaaacgggtaactgattcacacgtatctttaggaggtaaaagcaaacgataaaaagttggagttgccgaaatatttgtgatattatatcttttaatttcatgaataatttccctagtatcaaggccaaacagtcgaataatactatttctatttaacaaggcttgaaaaaatacttgaagccccgccatatgagttggattaaacgcaaatccccaaatatcattaatatgcctttcacttttctttacttgccttgtaatagaagcaaacgaatgtgatacactcttaggcaagcctgttgtccccgaagtaaaaagagtcattcgccatttctccctatttgataaaataacttcttcaaaattaccttcatggatttcatttccaattacaaccggacgagtcgcagcctttatatcaacatctcccactaattttctcacctctacatccgtgaaatctgcatccaacaagattatttcctctcctataacaagtgaagttactatattcttaaacacctcataataactttcctctttacaataaggattgtaaacagatgtattcctaacatcctctatcaactgatgataagaaatatttacaccgtcttttacatctatatagaaaacatcatccattactttaatttttccattatttctccaatagtcgagacaacaccctctccaaaaatatcaatatcatattcagcctcaattctaacagtaagttctgccagatcaagagaatcaaacccgatatcactcttcaaagaagattcctcagaaataaattttactgtgtttttaccgcgattttcaagcacggtattgatt

SEQ ID NO: 706 - DNA, 1580 bp, Butyricimonas faecihominis
ataaaagatttaaaatggcagatttaaatataaatatcaacggcttacccctgaaaaatcccgtgttgacagcatccggaaccttcgggtatggaactgaatttcaagattttattgatttagaacgtctaggcgggttcatcgtgaaaggaacaacgttaaaacatcgtgaaggaaacccttatccccggatggccgaaactccttccggaatgttgaatgccgtgggattacagaataaaggtgtagactatttcatcgagcatatttacccgacgataaaagacataaacagtaatatactggtgaatgtatccggttcaactatttctgattatgttgccacggcagaaaaaatcaacgctttggatcatattccggcaatcgaactgaatatttcttgtcctaacgtgaaagaaggtggtatggctttcggaacaagttgtgtttcggcggctgaagtagtcaaggaagttcggaaagtctataaaaaacacttaatggtcaaattatctcctaatgtcacgagtatacaggaaattgctttggccgtggaaggtgccggtgcagattctgtatcacttatcaacacgttgatggggatggcggtcaatgtaaaaactcgaaaacctgtattgagtacagttacaggaggattgagcggcccctgcgtgaaacctgtcgcacttcgtatggtttggcaagttgccaaagtcgtgaaaattcctgtagttggtttggggggaataagttgtgccaatgatgcgatagaatttttattggccggagcctcggccatacagatcggtacagcaaactttatcgatccgacagtaacgataaaagtgattgacggaattaacgattacttggatcgaaacggtttcaagtctgtaaaagaaattatcggcttgatataagaaataggaaacaaaaaaggatgaagtcaaaagtcgataaaatcgaatggacttttgactcattttttttactctttttcgtagtcttcaaaactaccatcttcaaaaaacaatataatccgttttattttttttgtttgtttcgttaaagacctgacggatgttattggatctctagtttcttccaattttacatttttatcggacataacaggtgtattttgtttttctgtcggttccatatcaaataatgtaggctcggttatcaccggatttttttcttcttgtataggagaattatccattgatccgtttcctgtgattaaccaagtcagattgaggtccggaaatgttttagcaatattattgataatatcaaaaccgggtttattcctgcctgcaagaatatgggaaattgtagaagcgtttactccaatcatggccgcaaactttgttgcggtcaatccttttttctcgataatttgattcaaacgttcttgcataaaccttttatttttgtaaaatcaagatttacaaatgtaatcattcgagttgagaaatcaaaattacatttgtaatgcacgaaaattacagatgtaatcagtaaatcatcgtgatatttgtcaagctatgttttattagtgtaagattcttgttatc

SEQ ID NO: 707 - DNA, 1580 bp, Butyricimonas faecihominis
atataattctcaagaaatgaccggaaggccattaataacataagcatgtaaatgggggtacgaaagaccaccacctttaaccaacaaaggtgtcgcgcttcttaatattcaagaaaagtttactgactagtatgacgcttttatctttcatcgtagcaaatttgggaaaaataaaaaaaaagaccaaggaattcttgatctttttttattacttcttctttttctttgccattcgtttcttcatcacgtttcttcggttatcctcggcagtatatgtatttttcgccttcttagcatggaaagccccgcctccttgcggtttcccccgttgataaacaatattattggtctgcacctgttcctcttccagcaacaactgagaaatctccaacttttcaggcaaatcaagtatttcaacttcttgattaatcagacgttctatatccatgaaacgatcctcctcgatttccgacacgaagctgatcgcagctccttcttttcccgcacgagccgtacgcccgattcgatgcacgtactcttccgccaaagaaggtatatcaaaattgatcacgtgactcacatcctgcacgtcaataccgcgggctgccacgtcagaggccaccatgatacgggtctctccctccttaaatgacctcaaagctttcaaacgggtattctgagccttattcgagtgaataacactcaactcgcctttccaatgatcggccaaacgctccacaatacgatctgcgttcttcttcgtctcggtaaagatcatcactttcttgaaattctccttgtcggcaagcaacaacttcaacaaattgatcttcgtcgaaatattcggcacgtcataacgatattgtttcacgttctccacgggagttgcctgacgagccacttccacccgcaccggattattcaaaaaatcacgtgacagactctccacagcctccgagaaagtagcggaaaacaacatcgtctggtgtttctccggcagcacctcgaaaatccctttcagttgcggaaggaaccccaagtccatcaaccgatcggcctcgtcgaccacaaccgtcttgatcatcttcgtacggataataccattataatatatatccatgaaacgccccggtgtagccacgagcaagtccaccccttcaaacacccgatcctgttgtgtccggatatttgttcccccgtacacacccacgcaacgaatgtccatgaactccgtcaacaattcaacactctcgcacacctgcaccaccagttcccgcgtgggaacaaccaccagcgcccgcggaaccaacccttgcgcgtaatgcaatttcatcaacatcgggatcaggtaagccagcgtctttcccgtaccggtctgggcgataccgatcaaatccctcccggagcgactgaccgaaaatacttcttcctgaataggagtcgggttctcgaaaccagcctcttccaacgccatcaaaatttgcttacttacatttaaatcctgaaatcccatatatgttacgttttaaaactatacggtcacaaaggtacaaaaagtagtgtctcgcacgaaataaatt

SEQ ID NO: 708 - DNA, 1574 bp, Butyricimonas faecihominis
atatcaactagatataaaagatattattctctccaagttggcccaaaatgcagaaaaatatcccgttgacaaatctaaaggaaatgcaaaaaaatacacggaactatgatcgtataccatgctagcaagaaaggattcataaatgatgttttcaatagtactatcgccgatgacatgacaatgctttcatgccccatttgggaagatacaagtaagaaattgactatatcacattaatgtacctcctagagcattttcgattgtctgtactcttcagatatttctcatacagaacgtcgtaggtcatgtgcttgcgcatcatgtcctttgcatagtcttcaacgttctcctgcatgaaggcatacctgtcggcgtctctgccgcgatgcccgtcgcctttcagcatgattgcctgcagttccgcatcgttcaaggcaaggaggtccaccatactcctgccggatgcttctgcgcgatctcgatagttcctcaaagatgtgcggctgagtttcagcttacgctccatctcgcgtagtgatgtcccgcatgaaaattcgcggataattactctgatgtctgtcattgtcgcttttacatttaccatatccttgtggtattattaccacaaagttacctcgtcaaaccgtttgcgaccattccgaagaatctgccccaaccatgctggcactagttaactggggggtacatttgattccgctacaggcggtacatttaaagtgctgcaaccaattcttgaataattcgttgagtttctttcttatactccttactgaatatcccgaattaactattcttcaagtgatccaagaacaattcatttctttttctgccaacacaaatcaccatctttagtgtttacctctttctattttaataatagatgggaaagtttcgttcttactcatcaaatatcctcactatttaattgctgttactctcaaatcatatctacggctacctgtgtcaagatcaacgtcatactcttttagtcctttttcaattgcaattagatgtaattcattcttatccttttgtgttatatctagaccataatagattgcattcaaacatccaacatcaggaattgagacataatcattctcatcctctaagttataataaagcattctccattcatgttcgtgctcgtattcttttctgtccttataaagataagctcgataccaatataattgattaacagatattttagacgacaaaaagttcaaccaatttttatctccaacttgcttgaaatattcgtaagtatgaatatttccctcatctaatgtaacgtccggtcttaaatctgtataaatcacaggaaagagatttacattcattcccaatgaactatatttaaaaatacactttctgagatcatattctagtgcaaaccccttatatccatctgcgtacctatcccacatatacttagactgcacactttctgtaaaacaggcaatttttgcactatttcttggatttctaaaacgcgactcttgcttttttatcgcagacccaatattattgcaaaaatcaacatatttacc

SEQ ID NO: 709 - DNA, 1572 bp, Butyricimonas faecihominis
atattatagtggtgggaatattgctaggtgcatgtagtgatttcttggaggaaaattcccaagatttgatgattcccaagagtgtgaagaattacaaggagtttctgtatggtgaagggttgaataataaagtcgttctttgtgaatatttagatgtcatgacggatgatgcggaagagattattaatacgaaccgacctgctgcgacaagtacggatactcggaaattctggtcctattacacatggcaggaatatcctgaaatgcagatggataattctttattggaagacaatgcatggggagaatattatcataggatattgattgccaatattgttttggatcatttgaatgatatggctggaacgtatgccgaaaaaatggatttagcgggagaggcctacttcttgcgggcttggtcttattttatgctggctaatttatacgggaaaccgtatattgacgaggctcaagcggccaaggatttttgtgttccgatcaatagagctattgatatagaggaaaaaccattatctcgttcttctatcaaagaagtatatgatttgatggaagcggatataaagtcttctattgcatctttcaaatctgcaatggtcgagaaaaccattttccgtcctaatttaccgacatcttacctgctggcttcacgaattgctcttttccggaaaagttatgatgatgcgatcgcttatgcagactccgttttgctttcgacaaaggcaactttatttgatatgacggaagactatacgatacctcgttttttgaatagtggaaattgcgaaatcttgttctcttatggagaagcaccatcgggaggtttagccgcttttcagtacgcatcttcaaggcgtgcagcttttattccttctacgggattgatgaaattgtatgtggagaatgatcaacgaaaggcgtctaagttattttttgccacggaagggaaaaagccgatgaaatactatggatctacatccgataatatgtatcctcatgcttttcgtttggcagaggtttacttgaaccgggcagaggcttatgcggcaaagggaatgacagccgaggcgttgcgagaggtgaatgccctacgggaaaaacggatacccgagaattatgaagttacggcagcaacagcagcagatgcctttgtcttggtgaaggatgaacggcggatggaattttgtttcgaggctttccgctggtttgatttgcggcgttgggatcgtccgaagatagtacatcgtttttcttcagccgaaaacccgagtaattatatagaatatgtcttgcaacaagacgatcctgcctatactttaccgataccacagaaagaacgggagatgaatttatcgatagagaatataaaccgtccacaacgggagaagtagatgaattaaaaaacagaagattatgaaaggaataagattaatgattatatgcgtgttactgttggggttcaacgcatgctcggatgaagatgatatccatgtcaacgtggaagatagttggtataatctggaggatgatccctcagatccggttcaacat

SEQ ID NO: 710 - DNA, 1572 bp, Butyricimonas faecihominis
atattatggatatgttaaaatatatattattgaccgtcgtgacttgtttgagtttatgggggtgttatgatgataaaggtaattacgattaccatgatttggatgagattgttattgattcaacaggcgcagggattctggcgaattattctgttaatcggttagacgttttggatatacccataaaggtgtatttcaaaggaaagttagtgaatggttcagaatatctgtatcccgaactggaatgtaactgggtggtgtatcaacagggaacagatgttccgattgcgggaagagatacgattgcggaaggaatcgagttgagtcttccgttgaatctggatgctcgccaatgggagttggtgttcaccgtgttaaataaggaaacgggagttcgtgcatttatgaagttcgggttgaaagttaatgccggtttgagtgagggatggatggtgttgtatgaaagagatggaaagactgacgtggggatcttggctaataaacggattgcaccgaatgttgttaacgaacaggtttgggttgatgtgtttgaaacgtttactggtgcatcgttagagggggaacctgtgcgattgttgtattcgaaagtgacgaaaccggaggttgttatggctgttaccaaaaaggatatggttgcggtagacccattgtcttttactaaattgtattcttttgatgccttgttttggacggctcccgaagtgaaagcaccggggtattacactgcattttataacaagcgagaaatggttattaatgacgggaaagtacatacggctaattacacgacgagtggttcggacagatcgtccattcattttggtgcgccttgttacggaggatacgggcgattggcgaattggagtcctacaacgtcatcttatagtgctgtcttgtatgatgaggttcagcaatgctttaaatgtgtgaaagcaaatagttctgaggtttctgatttccctgctcaagatgcagcagtagcttttgattgtaagaacgtggggttggaattggtggcgagtgattatggtcgggccattatgtcttctggttttgttatggggcattacgaggatattgtgatgagagatgctaccgggcattattatctgttgattgctgattttagttctcaaacgatggttggtgtcgggaagtatgatatgggaagatgtgaaggtttgtcggatggaatagtttctgttgcggcagggtataagggagagattttttattatgctacaggtaacgggctttatctatacgattataaggggacgaatacgacgggggatggacctgtttggaatgtgccgacaggagaacagatcacttgtatccggttgcagaaatattgttacgggacgacgatgatggctcccattccggtaaatgattgcgaggtgctgtatgtcgccacgtacaacgagaaggaaggtaatggaaccgtgtaccaattcatggttgacccttccagcggagccgtggacaaagggagcctgctatctttctccggtttcggaaagataaaagatatgggatggaaaatag

SEQ ID NO: 711 - DNA, 1571 bp, Butyricimonas faecihominis
gcttcgctgccacctcctctataaacagaggaggagctggtaactcttcccaaagtcgaaaagtaattcaactctccctctgtttatagagggagtaccccgaaggggggagggagtttgttttttcattttcaattttcatttgttccctcgtccaccacgtacaagtctggataattacgtcctaacccgtcataatccaacccatgccctaccacgaaatcattctccaacgcaatacacttgtaatcgatcgttaggtcgtacttcaacgctttcggtttgtagaacaaggcagccacctttacttgtttcggatgtttctcttccaacatttttttcatatgcataatggactctcccgaatcaatcatatcctccagaatcactacggttcgtcccgtaatatcttcccgtaacccgatcaggtcctgaacctttcctgtcgaggacaatccggcgtaagaagcaatcttcacgaaactgatttccgtcccctcaatcgtgatatgtttcaacaaatcagccacgaacataaacgccccgttcaacactcccagaaacaaaggacgttctcctgccagttcccgattaatttgagtccccaccctctctatttcccggtcgatcacgtcagcctcaatcatcagtcggaaacaccgatcatgcaatttgattcttttcatcctgtgcatatttctcttttgaatgatagacctatcgtctctctaatccatttttttatttaactttgcgcaaaagtacaactttgaatttaaaatccggtaaaaatatggacccaaaagtaagtattatcatgggtagcacgtcagacctgcccgtaatggaaaaagccgcaaaagtgttaaacgacttttgcatacctttcgagatcaatgccctctccgctcaccgcactccggctgaagtggagtcttttgccaaaaatgcacagaaacggggtattgaagttatcatcgccggagccggaatggccgcacacctaccgggtgttatcgctgccatgacgccaattcccgtgatcggtgttcccatcaacgcctctctcgacgggatggacgctcttttagccatcgcccaaatgcctccgggcatcccggttgccaccaccgccatcaacggggccatgaatgccggtattctggctgcacaaattctggctgttggcgacaatgcattaaaagctaaaatcgtggacttcaaagaatctttgaaaaagaaaatcgtcgatgccaacaacgaactggcaaaagtaaaatacgattacaaaacgaactgatctcccccggaaagaatcaatataacaaggggctgtccaaaaagtcatttttcaaactccctcccggcttcgccgtactccctctataaacagagggagagttgaaatactcccggtcttcgggaagagtcaccagctcctcctctgtttatagaggaggtggcacgaagtgacggaggagtttttgaaataaaataactttttggacagccccattctttatttactacccccaagaaacagtttatctttcgatcaaaaactataaatc

SEQ ID NO: 712 - DNA, 1571 bp, Butyricimonas faecihominis
gtagcataactgcacctatcccccaccacatccacgaaagacttttactagcatttaaaagtttcatctttacaattggagatctattcaccatatcatttttccaagtgacacgaacttcctcgattggttcatacccttctttactaaattggagataatacgttccaaagttttgtatttctattttcttaatctgccctttaaaatcagttttattaacaacttcctcttttacaaaccgatgaagactatcatatacaattactttaggtttatcaataggattcccttctgaatcaaacacgccaatctttattgcaggttcaacatactgtggttgagcttgtgtcagcaaactggttccagataaaagtcctaacaaacacacgaattttattgctagatgtatcatttcttcatttattattttttacaacatgctcaatttcctccattcccggattggtatccaaaaccatcccatccggagaaatcaagtatagagtaggcaaaaattctaccttataatcatcggctgtatcacttccgtttatctcctgatcaacacgtaattgtttccatataggttgatcctcttccacggcttttaaccaatcctcctttttcttgtcacaggaaatagcaatcacttcaatccctaattcttgcagacgaccatattcttttttcaactctttaatcttcatgcgacatggtttacaccaagaagcccaaaagtcaatcaataaatatttccccttgtaatccgacaattttacgttttccccctttagatccggcaaagtaaaatccggggctttacccgttaattgtttttgttttgccgcctcatatttttccatgatctcctttcttatttccgaatcaggtccatcccccatcgctttcacagttcgtgtgaataatttaaaatcataactgattatccacatattatcctgtaccaacatggccgccacggaactaccactgaaatcagtcaccatatccaatagcagatcgttcccttgtttccataatcgttcattttctcgtcccaatgactctaaatccccttcatcacttgtttctgccattcgtttttgcaaatcgaacctttccgtcgagttcttctcgatcttttcgagatgagcgtttaaccgggattgcattccttcctgcccggtctcgactaaataattattacctatctttttcaactggtactctccgggttctgaataaaaataaactcttccaccatagtttcccatatttaaataaagcaaacgattctccgccttaccttttaatgtaaaagtacgatccccacgtaccgtactttttgcaagagtatcagtacctttcccttcccccgtgagtaaataaacttcagtggctttactattttcgggcagggtaccctgaagggtataataatccgaaggtgtacatgctagacacgccacacccaatacaatacaatctatgattttcatgttgtaagaggtatatatttcaaaggagacgctttaagcatctcctttgaaaaaagattcattaaaaag

SEQ ID NO: 713 - DNA, 1565 bp, Butyricimonas faecihominis
atttaacgatttcaattataattcaacacctttacccttcaattcccacatccccaatatctcgaaacaaaaagtttctctacccgctattccggtattttctatagaaccaatgatattactcaaaatctccttctcttctttattccatctctccaaaaacatcgtatcttctgacaaatttttaaagcatctctccgtccgcaaccactgccacacttgtttttgttccagattatcgtaatctccagcaattccctccgccatctcccaacaccactcctcccctgtaaaatagtaccaattacaaagcaatcgacacacgttaggagttctacccggaatcacgctctcccctttctcatccacggtcaatatccgataagccatatccaacgcctcattcaaaagatccatatccgaatatgtttgataagcatccatcaaatcagccacgtaccctatcctttcgtccagctcgatagaggtatctttcattgccttagacaattccttggctatttcacgtaaccgttcatgaatttcctgcaatgttccatactcccattctaaaacgggagaaacccgaaccagcgcgtacacggacaaataaccatgtagcaaatgagataatgacattgcagaacaatcccttactcgtacatcccgaatggtcatgtacaagtcatgaaaaaaatcattcttcattcttctattctatcttttccagaaaactaccaggaatatacgctgtagctaaagacacgaccccttccagccttacgaccactcttttatgacctttcacccggatcaattcaccctcgatcccggcaaaatccccttttatgacacgtactttatcgccttttttcagattctcgttcaccacctctaccatttctttggagaaatcaagcaagaacataaaatcattcatctgtttatcgggaacgatcaagaagttacccgtttcccgatccctcaaataacgcatgtcaaaagcatactcttgaatcaatgacatacaagatttaaaggtcgtatgaataaataccagattaggaataaccggtacttctattaatttatcaacaccatgaatctttcgtgcaatttgttggaacggaatgaaattctcgatccccatgctatccaaacgctgttttatctttttctcctgacgacaagtatttgcaacataccaatgtagctcgctatcggacaatttaagcattacataatttttattcattcattctaggacaaagctgcgcttcctgatcatccacggagtgatctttgcccgaagaattaaataagacgcccttttcctaaacgtccgcctcttaaacagagaggaccatattagacaaatgaacggggcaaatgtagttcataaagattttcaatgcaaattttcaaatacatttttcctcaaaacttaataaattcctgagtttcatcaactcttacatctcttcgttatctcttcgatatactatcgatgaacacatgctctataggaacgaagagataacgataacatatacactatatgtatt

SEQ ID NO: 714 - DNA, 1564 bp, Butyricimonas faecihominis
ttattgcagatacatttaacgatcacctctttccaatcgccagaaaacatcattataaaaataaaacatacctaataatagtaaaatcattaatcttgaattatttaatgctaacaagatgcatgtattattcatcacgaaaatcacaacaagtaaagcacatattaaccaagaaattctccgggttctaaacatacgataaaaaggagcgcaaaaaagaaatacgatcattgccaagcccaaaattccaccttgaatccaataatgtataaacgaattgtgtacattggtaaatacccccaatccatctcccgaggactgaagccagttatttactctatgtttagcatatattcctaatccccagacaccgaactcgtcaacatgaataaaactttcacgaataaaaccgacacgaggggctatcgttccacccgcatatattccctgttttacattttcaacttctctcacgatctcttctgtacgctcttcgtatttccccttcaaaccatcaaacacgaagattccaaatacaggtaccaacaacacaattccgacaagtattgccgagcgcacacgaaacgaactacgcataaagagatagaagttcattatcccgaaacctagaataaaagctagaataccggctttagtcaccgtaaatgacaaaaaaagcgtaagcaataaaaacattacccctaaaaaaacttttagtcctttgtttctataaatgaaaatcaagaaataagcgattaacgcggtcaaggctatataaagcgtctggggttccaagtataaattgcctcctaagaaatccagcttattccctcccaaacgatttgcatacaggaaattaattgcagatgaagtgtctgtaaataaaccaatcccgacaagatcaaagatgacatatatatttaacaacaaacatccggcacagaacaagaaaagaaaacgtgtaagcaaacggggagttaaccattcttttaaagaaacaacgtatatcgggattaaaataaaatcaagcaacaaatcttcaaatatcccataatagggcttgtctgcccatgtacagctccgtgttgtaaataacgtctgtaacaatatataaataaaatacgtgccaaacacgagaacatattttcctcctgtttgcaaatcttttacaaaagaatccttacgagtaacagcatgaaaaagaaccatgaaaaggagataataattaaatgttttcccatacaaaggagccaagctacccagtaaaaatccatttagtaaaaaacatatctcccacattccactcatgctcattttttgtaaaatcaattactgaaattgtattgattgaatccccgataaaattaggcatactgataataatcctcttcatcttgatttataataaatattcatttaatcatataaataacgaacttcatcacaatctcatacaacagaactaaatagctaatgttcaatctgctacgggctacaaaaaagatagaaaaaaagattgtgttagccgaaaatgatgtatatttgcatatcaataaacgaacat

SEQ ID NO: 715 - DNA, 1563 bp, Butyricimonas faecihominis
aaaaagatattatttatactggttatgtggggaatgcttttttcttcatgtaccgattggttggatgtaactcccgaaaattctattgaagaggcagaccttttcaaggaggctactgggtttcaaaatgctttgaatggtgtgtatgagcagatggccagtactaaattgtatggaaaggaattatcgtttggtatgttggatgctatgggacgggtatggtgtttgcagggtgagaatttttataatatcaaaaattaccattattattatcaagctggaacgtttgcttacgatgcaaacgatgatataaaggaggcaattgatggagtatggagtacggcttatactgcgattgccaattgtaataacatcattagcaatattgataagttgacgggagaggattttcgcacgggagagcccgagcgattgatgatcaaaggggaggcactggctgctcgtgcttggttgcactttgacttgttacggatgttcgcacctgcgccaagttctaatccctcaggattgtatattccttatgttaaagagtttccgtattatggagggcagacacccttgacggtggaggagactatggaggctattgaggtggatttgaaagcagcacaagagatgattatggcgtatgacacgttggatttggcacacagagcgatgttaagtggctataatcgttttaaaggggatttttcaactgccgtgtccggaaatgatggttctaccgtggagatgttgccgttctattattatcgcggttatcgaattaatgctttggctgtgacaggattgatggcacgtttttatagctattggggaggagacaaacattctcttgctgcggcaaatgcacaaaaggttgtggatttcctagtgtatcccgaggagaaaagaccggctttggagtatgtgagtattgacgcccgttggaatccggatttcaaattttccgaagacttaattttttgcttgtcttacccgacactgatgacggattacacggagtttgcaacttcttctagtaatgcttgtttgacgatcagtaaatatgatgaaatttggaatgatgattttgctgatgccggggactatcgattggtgatgatttatgatgatcaaggagactatatgccattgaagaatgtaccttctaaaacaggtgatgcggaggtacttgcgaaaattgaggatatggttcctatgattcgtatgagtgagatgcactttgtgttggcagagtattacgcttctatcggtcaatgggcaaaagctgccgagtttatcactaaggtacgtgtaggacggaattgtgacggttccgtggatttgggtatcacggatatggaaacgttcaaggctcgtttgttgggagaggttcgccgggagttcttcgccgagggacaaactttcttttattacaagaaatatggagaaaagctgattaaggatatgaatctagattcatttgtagttcccacgccagatagtgaaaatattcattaattattgtagcagaaattatgaaaaataaagatataatgt

SEQ ID NO: 716 - DNA, 1560 bp, Butyricimonas faecihominis
gaattaggaaaataactataactaaccatggacatagacggatcgacataatgcatcttcaccactttcccctctccttccagcacgcgcaccggcttaccataaggcttacctccaagaatctcgtataaatacactttatacttcccatccttatgagtagcaaataccaaataatcaaagtttttatctgcattatcagaacccgaccagtaacgattactaatataagtaatctcttctcccgtagccatatccgtcggacgaagtaactcttccgtattctgtaccagatcatacatatacaattgattatcgtttacaaaatacatcactttagctgtcaactcattcacggcaaacagattcgccccgttcaatttagacgaagttgcaacttctgttaccttttcaatcgggttagaaggatccattcccaacaccaactgataaatataatgttttcctgcagtattctcatcttcaaacaaagcataccctgtactcgtttcatccatgtaattctttccaaagaatttcagatggtgagttataccgttaggcttattcggtttttcttcaccattcttgtccaaatcactataagtatgtaagctaccattaaaatccaaaaacaaaaagcgtcctttcaattcgtctaaataataaaaacaagtactcgcaaacacaccgttctggttgggttttgtttcctcgtcatcatttaccatagcggggaatccgaactttcccgttcctaacaaatcccaaagggatgcttgtgtagaaaagtatgctcctttgtcagaaatatatccgaccccgtatgcatttcgccacacataatacggcttttcttcgggagcctcaccaccaaggaacatgttactatgagtgtaaatcgtactcatatcctcgatattagaaatccggacatccttctccgtgcaaacagttaaagccttcgtgatcacgtattctgccgtggtttcatcaacaaaacaatatccgggatctaaccctaagctaaccggtgcatcaggcatatgttccccatccattttcaagaaaatattatccactaaactgttatcagaagcgtgcaaatccacatctgttgaatttcccatatctttcaacaggtagaaaccttctgaaaatttagtcaccacgctcaaagacatcacctgatacgtttccagtttattgctcttattcgttacccgaaatgtcaaatcataaaacccttgtttaatatttaccggaaaatccaacacccgatcagttccaatcgtgtccagtattatctctattttattggaagtcgtacccgaccctttcgtcaggttcaacgtccataaatattcaaaatcactctccccacccgttgccgtaacggttggttccagatgaagaacatcctggtaggacgttttcgtgtaactcttttccaatccttcagtattaatcgtactgatttcatgatagtcatagtttccctcgtcgtcataacatgccgaaacaagtaacgcgaataaacagactgataatatattgtat

SEQ ID NO: 717 - DNA, 1556 bp, Butyricimonas faecihominis
atatacaatagtattggacataaactaaaagggattgtaaaatgaaaaaattcgtattgttagtgttggttttaatcactggtttaaccgtgttttcacaaggaatagaattccagaaagggcgctatgcagaggtattggaaatggcgaaaaaacaaaataagttggtatttatagatatatatacttcttggtgtggcccttgtaaacatatggccgataaggtatttccgcaggctaaagtcggtgaatattataacgctcatttcttgaacttgaagttggatgcagaaaagagtgaagacgggaaaatggttgcaaaaacatttggagtatctgcttatcccactttcctttttgttaacggggatggagaattggtttatcgtttcttgggtggtaaaaccgtggatatgtttgtcaaggaaggcgaaaaagccgtggttgcttttgcggcacaaccggaattaaagaaatacacgaagaagtatgaggaaggaaacagggataaagaattcttgaatcagtattttatattgaaagatcggtccggtttggattgtagcgatgtgttgcttgattattttgctttagtagatgatagtcagttgttggattcgataaatgttccgcgtattggtaagattacggtttttgacaagaaattagccaaccggttcgtggatgcggcttgtgcggaagctgttaatccagtgaaagataaaaagcattctactaccgtgaataaagcaatttgtacgtttttgagtgcttgtgttcaaaagacggcacaagccgatcaagaagagaattttgatgaagtgttggctttgaaagatcgtttgtttaaggcaacaggggccaagaatagtgccacggcggcttcattggggggaggaaatatttatatcccttcggagttactacgtttgaattactattcggctaaaaagaaattagataagtttaatcatctttttattaattatatagccgaacttcaaaaaaaatacaaggaaactcgtgaagagaaaatagccatgcttaaggctatggaagccaagttgaaagaggccaaagaaagtggaaatgaggcggaatatcaagcggcaaggaagctaaatgcgatgatgtctgctttttcaagtattgatgattactatacttcaacgagtatgatcgagaacgtggaacgttacgaagagatatatgaaggggagaaagatgttgcatacaaggatcgagttgctggttggtacgtgtttttacatcagttgagtccttctgcgaagacagcgacttacgtggccgataagttgttagccttggataaaaaggaactggcgaaagaagtcttgacattaggattgaaagatggaagtgcggcagctggggtggaagagggagacgtgaaagcttgtcaggcaaaattagatgaattgaaatagtagcgtatttgtaaataggattaattatgaaaaaaattggatttatagtacaatttttgtgcttggccctgttctcgttcggacagtctgctgaggagggaattcgtt

SEQ ID NO: 718 - DNA, 1553 bp, Butyricimonas faecihominis
gtataataattactattaagctccgataaaaaaccgtctacacccgggaaggctgcaggcaagctggcggtaggatgcaaggccaaccaggtagtagacaatggcttcataatctgtatggtccagttatgatttgttgtatttactaaatccagaacatacgaatccccatccttttgagtggagatttccgggttccaactgacctcaacagactgggacaagttatcacaggtaattgtcaaagttgtggatacaagagtagacgttcccacgaagtttccgacaatcttgtatttgttacttcccaacggttggacttgcaaaccggtaagccaagttgttcctcccgtcaccacgggcgtgacacctcggctcgaatataccgtgcaaatttcaataccgttagcaacagaggtcgtttggtttttaccgtacaggttaaacacgttattggacattgtcatccgatgttgggcgtcagccacgatgcaagggaaatcagcgtcttcatccgtcaattccaccttcaaggcatttgacggggcaaaattgatcgcatccgtcacgttggtatatcccggaccgttcacgctaaccaccgtgatgatataacgatgattccgcacgacattcaagggagtacctacattatctaccatcaccactttataatacccctctttccctttatacttggctttaatgatcacgcccatgtaatcgtttgtcgtacaattccgctcgtaaatatacaaggaaggagtttccccgtccgaccatccgttggcgtaattcaaagtactaccggaaagaggacgccctgtcacgggggtgatagtcatcaaataattcgtgggagtcaggtaaccgcaatcggagcctttattcaccgttatactttgaacggtgaaatcattcaacccgtttgcggcgctggccgcacctttctttacctgcacgcaagccacggcacgtaacaacttcacgttatccgccttcgtcacgatattaattcccgtcggtagttcaacacgtccccacatgatcaaaggcatcacgttatccaccagagttcccgcaaacgtcgaggtctttagcgcaagcatggccgcactttccgtcattgtgggggtaatgtccccgaaattcagccggtcagtcaccccgtcaggagtccgcccattaggcactagatggataacacgtcgtttcgaagtagcatccaaacgtatcgagaaagaaatttccgtcccgctgggtgtcaactccccgccatccaccttcacccgctccatgaacttcccatcctcgtcgaacaccagcacgtccacgttccggatctcgctgtccgtgtaggaacgagcaagcgactgtacgttttccggctctggcagagtcacagtaagagctacattcacttgacgaggtgtctgtataggatgactatcatcactggcacaagaggcgaataatatgcatattaaatatggtattattttgagatatgatttcatagtattattccattaatttaattacaacatttattc

SEQ ID NO: 719 - DNA, 1552 bp, Butyricimonas faecihominis
aataaaatgaatatgaaaaattttgcacttattggcgtggcgggatatatcgctccaaggcatttgcgagccataaaagacacggggaatcagttggtagctgcttatgacaagtttgatagcgtgggtatcatggatagttatttcccgaattgtgcttttttcacggagatggagttgttcgatcgtcattgttcaaaattgaagaagacagccgaacgggtggacatggtatcaatctgtacgccgaattatttgcatgatgctcatattcgttatggtttgcgtttgggggctgacgtgatttgcgagaaaccgttggtattgaatccttggaatatagatgcgttggaggatgtggagaaagagacaggacataaagggtacacgatcctgcaattgcgtttacacgagtcaataaaagctctgaaaaagaagatcgaggaaggaccgaaagacaaggtgtatgacgtggatttgacttatattacttctcgcggaaattggtattatacgagttggaaaggggacgagcggaagagtgggggtgttgccacgaatattggggtccatttttatgatatgttgtcatggatctttggtccggtgaaggaaaatatagtacatgtgatgagtcacgaccgggttgccggattcttgggattggaaaaggctcgtgtacgttattttttgagtataaatgctgataatttaccggaaaatgccgtgcaaggggagaaaagaacttaccgttctatccgtattgagggggaggaatttgaatttagtcagggattcacggaactgcatacagagagttatcggaaaattctggcaggagaagggtttcgtatagaggaagcccgtaattgtatcgggatagttcatgatattcgacacgcaaccccaatcggtttaaaaggggattatcatcctttggctaaattgccattggtgaaacatccttttggttggggaaggtgataaaaactaaaagataaaagttagaagataaaaactaagggtaaaaactaaaaataaagggaaaatgaagattattgataatgggttgttagatgaggtttctcggcaggccgcagagagtccgcgtttgaggatgaattataattttcacgatacgttggaggctaatgctcaacgcttgttgaatgctttggagccggggactgaattacctgtacatagacattgttttaccgcggagacttatatcgtgctgcgcggtgaaattaacgtgtttttttatgatgatgacaagcgggtgaccgagtccgtgaccttgaatccgttgaaaggtgaatatggtattcatatacctgccgggcaatggcacacgttggaagtcgtggagaaaggaaccgtgatttttgaagtgaaagatgggccgtaccgtccgttgggaccggaagatagacttgattaattttagattcatgattttagattttagtcgcacgagcgttcgctttggacgagttacagattctttctcctctaaattctaaactctacattttaaattattgtgtat

SEQ ID NO: 720 - DNA, 1541 bp, Butyricimonas faecihominis
tatcttcttcatgcggttataatttaaaagtttacagacaatcccacggtaaacttacgtggtaacggataagatcccatattatccaccccttgagtgggattaactaactccggatccaaaccagaataatttgtcaacaagaacaaattctctcccgtaataaacactctggctcccgaaatttttaacttgttaagaacccgttcgcccacattgtatcctaacgtcagttgtttcaaccgtaggaaacttacattctcgatatcacaatcataacggccacttgtttgattttgtaaataaacatacatctgggatttcggataatcagccttcgaaccggcccctgtccatatattcacatcgttaacatccacgaacaacggtttcgcatccccgtttaccgtcaaactcatatcatcataaattttcacaatatgccgcccaagtgaataattaaagaatatattcaaatcaaaattcttccaacgaagttgattgataaatccaccatgagccaagggaagcggactctttgcaaaataaacatcatcattttctgaaatctttccatcaccattcaaatcgataatcttccggcttcccgggagaaaaataccggtcgtattcccggaataaagaggttgcacctctctattggccaaataataaactggaacatccttcaaggaatcatagaaaccatctgttttaaaaacccttatctgatgcaggggctttccaatcacctgttcctcaaaatcaaaaccatcggcactcttctcaaaacgattccagttacgagaagcattaaatttcattttccattttaccgacgtgtgtctcaaaatatcagcctccagctcaagttccagtccttgattagaaatagccattccattctgccactggaacaagtgataataaatatctccaggcaaagagattctgttcaactgtcctttagtgtaacgataataataatccacgacaagacgtaaacgataatctaaaaaactcaaatccaagcccaaatcatattgatttgtttcctcccaacttaatttcttattaatgacaccaccgtttacatctggaaacattgccgcattgccgtgaaatgtaaccgaagtcgcagttaacaatccttgagacaaataccgttggctaaatttttgcccggaaataccccaacttgcccgtatcttaccgaaactcaaccaataaaatggtttcataaattcttcatccgaaaacgtccatcctaatgctattgaagggaatgttgcccaacgaacatcctctccaaacacggaagaaccatcccgacggagtgtcgcttcaaataaatatttctccttgtaattataagtcaatcgaccaaagtaactattcatacgttcttcagaaaaaccagaagaatactcaaaagctgacgcataagagggattctccgcggttccggtattattcaagccattggctccaccccaaccggaccccacataatgaattttatcattaggtccgtttatacc

SEQ ID NO: 721 - DNA, 1529 bp, Butyricimonas faecihominis
gtttcataattttgcagttttaataagcatatccatttcgtttccaatatacggtctgtttcatcaaagtattgttcgtaaacgcaccgttccccaccggcaaataatatgccccgtcagctacatcctgatccgtcaacgtcttgaatttaccccttagcttttcccgaaaagtcccgttacggataatatcataaaaacgaatacctgcttcgagaaacaattctttatcccgttctttagctatagcctcttgcaaatcaccttcgctagccgaataaaggggggcaccagctctagcccgtatcgtgttcaaatcattaattgcaccttgagtatcaccggttttaactttcacctctgctcgaagtaaaataatatctgctaaacggatcagtatctcgttatcctcataagcttttaaagttccatcacctgatccacccacgttcgtgatcacacctctccatttactgatatatgccgcaccttgggtaaccgaagtagacacccccgccatggaatctaacttataaaaatactcatctcgacgttcgtctgatacatccatgtacattttcatagccgtactattattaagtcgcattaatgaacgccgggttgcaggtgtcgttaacggttggattggccatttctgacaagctccggcaataaaagcacccgaacctttcaggtctccaggtagatcttgataatctatctcgaaaattccctcatcgctatttcccagcataacaacatcacaaacttctttcggacttcctgccagagaatacccaccgtatttaatcacagaatctgcctctgcaatagccaacttattcaattctggctcattattcaacgctgccttccaagcatacagatgagccaatattgcatgaacggttccactcgaaggcacctgtttgctcgtcacctttatcccactggcatcctgtaaatcctttgctttaggcaacatattcaccgccagtttcagatccccgatagcaaaatcagccaattcctgccatgaagcacgagctttctccccaacatccacggactccttgatcaaaggagcatcaccccaggttctcaaaatataaaaataaacataggctcgtatacagtaagcctgccccaaataataattgtgccgcacctccggcaaatttgcccgaccaatattatctatgattaaatttgcctgagcaatcactctatattcattagcccaagatattgccggataactggcattccacacgtaactaggctggttattggaagggtactgccatattgcattcagataatcaaaaggaagacctctatcccggtataacataacaacatccccgaaaacagtacgaaactcaccatgtaaaccataaacggcactctccacatccttttctgttttccagaaattattattcgtcacggcaatttcaggctcctcggtcaaaaaatcatcacaagcaaaaaccaaggccgcaagaaaaataagtaataatatattc

SEQ ID NO: 722 - DNA, 1523 bp, Butyricimonas faecihominis
tgtattgacgccaagtgttattggcatcccgggaattcccgggatgccaataaaaaagtaaaactattacaggaattacagttttttgaagtaaacttgtaacagaaaatagaattgaaaatgctttgtacaatttattgaatgtcaaatctagtaaaccaattttaggaaactacacggtgtattatggacgaatgttcgccttcggcgagttacaggctacaagttacagattcattttttagcttctcccgacagggatggtcgttattttgaaatgaaattttgtggtttatcctttattgtaataggggtaattgatgtaacatatttttgatcctgattgccgtgcgaggcataggttccgcaattgtcaagcctactaattctttttctgcagcaatgtcctttattacccgaatgacttcttccattttcatcccatcggggtctgtaccaacagcagcgatgatttcggcaggatcaagtacatccatatcaaaatggataacgactttcgacgctccgcatgatttcaaccaagttttgatcgcatcactgttttgtgcaacatctttgggcgtgagatgttttattccgtattgcttttgtcgttctttgatttcttcacgttcccagttgcgtaaccccacaaataatatgtttgatggggtaaatcgggtgggtaattccgctaggattttggcatctccatgccccatgcaggcggttacggccatggcgtgaaatccgggatagatgtctccggggagcgtgatgtccggatgtgcatcaatccaaactagggcaacatcattcttgtatttttgcgccagataggtaaagggaacgacactggccgagcattctccgccaagtgttacgattttatcgggattactgacttgtagtatgcttaatgcagctcttgtttgacggactataatatcccggtcgaggactccgtctgttaccttccgatctgtgatttcagtcgaaacgggaaccgttaatgtttcttgaccattgctcggggcaaggaaatttaagagttgtgcccccaagacatatccccttgaggcatcatcgggattttcgacctctgtaatcaatttcacgatattggcaccttgccattggggatagatcaaacgaattgtttttgtttcctttttcatattctggagatttattctatttttccctttcattgttttcatacaaagttacatagtcttcttcccttaaacaagtattggtaaatgattcagtatagattatttaagtgattccccaaaagctgaattgtcggttaaataggtgtgatggaagcgtgttttgtaataatatttgctatattgttgtattttggatgaaaaatgttgtgttttatcttttaatctctaactttgttaggcataaatgttgaattgacgttagtcagtatctgtttcttatacacatcgcagagcccactaggcttggctgaatctcgtatgccgtcttctgcttgaaaaaaaaaa

SEQ ID NO: 723 - DNA, 1516 bp, Butyricimonas faecihominis
gttccctgataggttaaaatggttagggtatgatttaagtaatactgaagatgtgagatctatttttaaaaattttattggttttgacgtccctttacacggatttgttaataatgctgctatcgcttatgatgatataattacaaacttgaactataataagctagagcaaatgtataaagttaacgtgtttacacccatgctaatgacaaaatatgtcataagacattttttacttcatcaagttcaaggaagtattgtgcatatgtcatcgataagcgtacacactggttacaaagggttagccatgtatgcttcaacaaagggtgctttagaagcattttctaaagatacagcgcgtgaatggggagaaaagggagttagatctaatgctcttgttgcaggttttatggagacaaatatgagttcaacacttacagtagaacaaaaagatcgaatttataagaggacatccttgaaaaaggctaccacgatcacgtctgtagctgatacaataaaatttttgctctcggattcagcagaatctataactggtcaaaatattcatgttgattctggtactatataaattatggtaattaaagtttgcaagacgacagaatggagtgatcgagattgggaaacttatgtcattggttataatgaagtattcggaacggatgaaacgatagctgattttaagaataaatatttttctgtttgtaaaggatatagtttgcattcgttattagtttctgatgaaggggatgtggttggtggtattacaataattccctgcaattatcgttgtcatcagggattttttcttaacggattggctgttgatgtttttatccgggagtctttcagaatagatcctttgatgttgagaaagttatataaacaacttgtagggacacttaaagaggaaggtattgaggtggtaacagcggttcctaatgcaacagcatatccttattggaagaatgttgtgaaatggaaagatataggtgaaataagttattgggtaatacctatcaaaattaataaaattttaaatttaaaattttgtggatggttgtttgagggattaactcggatttatttgttttgtgttctttgtttgtcttattgggtgtctttagggaagagtaaagcgaaagattatgcttacgagatagataaagatgataggtatattcagaataaatttcatgggactaagtatgctaatttttcagtgcaagatatattttattcttatagaatagtgaatgaagagggggtaaaaactgcttatatcatagaagcaactcaagaagggaaacgttcgatgaaagcttttttgaaggtaataaaagtaatacgacaacaaaatgttgatttaataatttatgtaggaaagatgggagtgtttcaaactctttttattaaagtacctaagaaattggaacctaaaaaattgcctcttatgtgtgatgtgttgattcctaatgacaaattctctgatatatat

SEQ ID NO: 724 - DNA, 1508 bp, Butyricimonas faecihominis
gctctattcaaagaatcatattatggcaaaaaatacaatagaacatgatggaatcgtgacacaggtggctgatacctttattatagtgaccatacaaaaccaaacagcctgtgcgggatgtcatgccaaaggagcttgtggtatgtcggaaatggccttgaagagcatcacggcagaaaaaccaaatgaagagatcaaaataggagacaaagtaatcgtcagtgccagtactcaaaatgccatgctttccgtgctgttggcatacattgttccttctgttttaattatcgttattttgaccttgcttatccttgccggagtcagtgaagttatggccgctacattatccctgattgcaatatcggcctactttatttgcctgtatttactaagaaacaagtttgcccaaaaaataaaattcaaggttaaaatagcataacctagaaaaaaataataactttacgggcgttataacaaactagaggagacaaaacaaacacctttatgatgactactaccattatttacaccattatttctttgtgcgctattgggatcgcgtctgccgtgattctctattttgtcgcgcaaaaattcaaggtcgaggaagaccctagaattgataccgtggaaagcatcctgccgggagcaaattgcggaggatgtggcaaacccgggtgtaggggatttgcggaagccacggtaaaggctacttctttagatggactgttttgtccggttggaggggcggaaaccatgacgaaagttgccgcagccttaggcatggaagtaacggtacaaaccccgcaaatcgcggtggtaagatgcaacggcacgtgtgaccatcgtcaacgtaccagtcaatatgacggttacaaatcatgcgccatcgaacattccctttaccggggtgaaaccgattgtactttcggttgtctgggttgcggggattgcgtaacagcctgtccgttcgatgccattcacatggacgagaacggtctcccggtcgtttccgaggagaagtgcgtagcgtgtggagcctgcgtgaaggcctgtccgagaaacatcatcgagttacgaaacaaaggagtgaaaggtcggcgagtttttgtttgctgcgtgaacaaagacaaggggaacattgcccgcaaagcctgtacagcagcctgcatcggatgtgggaaatgcgtgaaagaatgtcctttcgaggccatcacgctagaaaacaatttggcatacatcgatttccgcaagtgcagactttgccggaaatgtgtcagtgtttgcccgacacacgcaatccacgaggttaattttcctccccggaaaatcaccgaacctgctgatcaattgaaaactgaaacgaattaatttacaatttatgaattacggtttacgatgaataaaatcttaaatcaagaaatcataaatcttaaatcaacaaattcatccgtttttcaatctaaaatttaaaatctaaaatctaaaattaatacaccgtgcttaag

SEQ ID NO: 725 - DNA, 1505 bp, Butyricimonas faecihominis
gtataatataaaaagatatagagatgaaaaaaataatgaaaactgcctacctatttgtattgatcctgggtgcatttatgttcaccggatgtgaggattggtttgatgtgtcatctgatatagatgcgaaagaggacgatttgtataagacagagaacggttattttgacgctttaattggtgtttatgcgaagatggccggaacgtcgttgtatggtgatcaaatgactatcagtacaatggatttattagcgtatagttatgtgttgcgggatggtgctcctgagatttacacctcttttgcaaattttgattacaagacagccgatactgaaaaagtaattgcttctatttgggaaggaatgtataatgcgatagctaatgataataaattgttggaacgtttggaaaatgctgatcgaaagatttttgacgatgacaattatgatttgattaaaggggaagcattggcgttgagagcatatttgcattttgatttgttgagaatgtttgggccatcgaaagcgctagataagggagagaagtgtataccttacgtgactacttttggccaggggaataccgcatatagtacatttgatcaggttattgaaaaggtgctggctgatattgatgctgcaattccattgtttgataaagacccaatatggacccccatggagactccttcaaatgtttatctggtaaatcggaaagttcgtatgaatgctttttcggtgcgggcgttgagggctagagttatgttgtatgccggaaaaacagattcagaagtatatgattttgtaagtgagcttatggatacactccagactaatattaattatcctcgtttaacaacttctcctcaagatattgataaggataaaattatttcaggagagttactttttggtctttacgtggataagttatctaatgtggcttcggggtatttcccttctgttacaacaagtaaagagttaggaagtacgaaagagaaattagatgttatttttgaagcggataagtacaaaatgtctgatgttcgttatgagttattgttcgtaacggaagaggggttaccaagaatgcgtaaatttcgtcaagaacagaccgataaccagaggtctagaaatcaaatgccgatgttacgcttatctgagatgtattatattgccgcagagacggctccggatgtggagactgccttggtttatatcaatgcaataagaacggctcgtagtttactgggggtggaattaaatacaaaagaggaggttataagttatttggataccgagtatcggcgggaaatgcttgcggagggacaaatattttatcggtataaatatcggaatttagagaatattccggattgcgaaataaagatcgccgataagttatcagaagtttatagattcccgttgccacaacaagaacaggagtggggacagaaataatagtaaccttgtaaatgacgaatattatgaataagatattaatac

SEQ ID NO: 726 - DNA, 1504 bp, Butyricimonas faecihominis
gtatgaatacatatagatacattttgttttctttattgttgtcgttaggattgttttcatcctgttttgacgataagggaaattacgattataaagaaatcggggaggctgtgattaaggctattcccggcgtaactgataatggagataaactggtttgtctagagaatgatgttattcgcctaactcctgaggtagaattcaaggcgggaacttcggcttctgattatgaatttatttggttccgctatcccaaaaatcctgccggacaatcgggacattacgaacaggccgatacattggcaatgactcagaatctggaatataaggttataaatacgccccgggaatactggttggtttataaagtgaggaacaaagtaaccggagcgttgacagaacaaaagttcgagtttataatttcagccattagtggttggatggttctggatgaaaatgctagtggaaaggccgatattcaggtgattcgggataaagatattgttgatggaggtgatggtcggatcgtaaaagattacttttcatttaataatgaaggaaaaaagatggagaatgcacgttttatggcaatctgtccttttagttcccgtgctaatttgtatgtttattctgatgccggagcttatatcttggatatgtcgacgtataaagaaaaagcggatagttatactgatttgtttagctctaccgttactttagaccagattaatccccaagcggagcattatgatatatatggtggaaatgttgaggtccttgtgaataattataagatatataccgtggcttaccgtatgatggggcaaactcaattcgtggcagcttccggtgtgtatgattatactgcagccccggcaatagccccgatacgcataaatggaagtgcaaatagtgctgccttgtttgacacgaaaaataatcgttttatcacggttggaacttggggctcgataacggctcccgtgtctactggaggggcttttaatacgggagcgatcgacccggcattgaagtttgtatgtatgggagaagggaaagacggggaaacttgtatggtaatgagaaaagaggattcgggagaaccttatttgttccgtgctagtttcgtggagacggatcctgtggctttgaccagtgataatttgaatggattgaaggatatgggggtatcgaaatattatgcttttggaacacggggaaatttcatgttctatgcgacagattcaaaagtgtatacttggcgctatggaagtgaaagtgcctcggaatttatgactgtaggtgaaggagagaagattgttcagattaaaatgtatacgaacgtttcggatgcgacctttaacgggaaaattttatttgtagcaactcaaaaggggaatgaaggtaaggtttataaagttgtattcaatgaaatgtccggtgttgcggagagttcacctgtggaatatacaggtttcaatatcataaaagatatgtattatag

SEQ ID NO: 727 - DNA, 1502 bp, Butyricimonas faecihominis
aacctgttatgacgccagtcgtacggcagggtagccacgcgcggacgggataagcgctgaaagcatctaagcgcgaagcctgcctcgagatgagatctccttacagggtcgtcgtagacgacgacgtcgataggccacaggtgtaaagccggtgacggcaaagccgagtggtactaatcacccgaaagttgacgttcggtgggtgagatgattcagttaacgttccaagcgattgtcaatcaaggtgattgacggtcgatagaaagcatgaataaatgaactttaaagatattgtcacgttggcaagagtgccacgagaagtgacgaaagttggaaaaacagtgaggtaaggaaatcataattttccattctccattttcaattttcaattgcattaaaaggtgtctatagcgacggtgatccacctcttcccatcccgaacagagaagttaagcccgttagcgccgatggtactgccgataggtgggagagtaggtcgatgccgaattttcaaaatcgctggaatttgtttcagcgatttttatggcgaggtagctcagctggttagagcgcatgattcataatcatgaggtctccggttcaatcccggatctcgctacaaaatgaaacccattgagaaatcaatgggttttttatttgaatcaaatttaatattttattcggcaacagttacctcgataccgcgttcacgcaatccctcgagagttttactaggtacatatttatccgtgatgatgtgatcaacagcatccagatcgcatatttttccgaaacctctacgtccgaatttagaagagtcagccagaacgactactttttgtgcggcttgtatcattacctgatttaaattagcttccatcatgttcgtggtagttaatccataatctaagtctatcccgtcaactcccatgaagagtttactacaagaaaagttttccagcattttttctgcataatttccaacgacagagacagaactattccgtacgaaacctccgagttgtattatatctatgttcttgttacgagctagaatgtttgtaacgttaatggctgcggcaattactgtgaggtggccttgaggcacgatctctcgggccaacgcatgcattgttgttccggatgcaatgagaatagagtcgtctgctgtaattagacttgcagcatatctgcctatcagtcgtttttcttcgggataggacttttctttctcgtttacatggcgatcattgatataagggttgattaaaatggcactaccatgtgtgcgatagagcatttctttttcctcaagtaaagtaagatccttgcgaatcgttacagaagatacttttaactggttggcgagatcaacaactgaaacggaaccttgctggcgtaatgtttccaatatatagttgtgcctttcacttaaagataatgttttcattttgtttcgataatcatatttccatctatgcaaatatacatctgttttattg

SEQ ID NO: 728 - DNA, 1500 bp, Butyricimonas faecihominis
tccatactccatgtaatcagcatgaatcgtttcattttcgtaacatccgataaataacaatcccgataatacaaacattataatctttttcataataatctcctttatttggttttgctctcaactcgaaccggttgctctatctcaaaattacggcgttgaacgtctaacggaaggggtagcacataattagggctattagcatccaaaacataagttacaaaatttcggtctacgctaaaatcataatatttatgctcaacagctaatccccaacgccgaatatcaaaccatcttatatcttcaaaacaaaattcccgtcttttttcttcctgaaaaaggatccatgcatcctcagcatttttcgcttctaggtaaccattcccaccttcaatacgtttactatacacctcattcacatctttcattcccaacccccattctccctgcttgatattagcctctgcacgattaaaataaaattcttctatgcgataatttgtattccagcaaccagagtaatttacattaaatttgacaatcctacaactattccaatagtcaacaaggacatccctataattacgaacatcattactagcaaacaatgcgattaaatcctctgacggacagtacgtacccatcgatgtgtttgatgatgatgtgggatgcgcctctttatttagccaagaaaaaagtatactattattatccttatttaacataggtttagtatcactagaataacccaacatttcatttaatgaaataagcgtccgatttgtctctttcaaagcctcattacacacaattattacatcatcatatcttttttcttccaaataaatacgagacaggaacaagcgaacgacatctttattcggatgaaaaatagaatttttctgctcaccatcctctaagtttctcaaagcactttccaaatcattttccattaaatcatatacttcctgcaaggaagctctagtatataacttatcttttatacttgtttccttattgatcggaatccccatggcagtttttgcttgttcagcatcacgatacggttccccatacatatttaccaaataccaataagacatggctcggagagcctgcacttctcctaacaatcggaatttcacattgtcaacatcagcctcaaattcacccacttccttttcaataatattacacatcaatattttatgataaaagtattcccaggctgggtctattctttcatccccttccggtgttatttgacactcttttgcccatgtataataacttttgttagaaattcgatcatctttagttgtactaccaatccatgaaggaatgaacgtacccatgtcatcactcatataccaaagattatatccagtcgccccaactgatttttgaaccaattcccctaacaccaattcactataatggtctaattcatccggaatcaccttgtctttatccttataatctaaaaaatcactacaagaa

SEQ ID NO: 729 - DNA, 1498 bp, Butyricimonas faecihominis
atctatatccagtacaacttcatacgtcatattgggtttgaaatccggatcataaataatcaggaagttctcgtccacggcagccttccaatcttgtccggcagccaatcgaggattattcaaacgttcagggaagaagtaactgaaaggcaaatccaacacgtgttcctgtttgaacttatcccctttcatacgttccaagctgaaattctctttcgtcttgatcgtgatgatgcatttcttaccttttaccttggaagtcaccgtaaaatcagtctcttccggaatctcctgcaaacgcacattccatttcggatcaccgtaataagccaacacatcgcggtcatgccagaaaccgatctgatcattcgtgggttgttgagcattcatcgctttagcaactttctgagcagcaattaggaactcattcccatcgaaattatagttttccttgatcaaagaaggataccattgatattgctggtacaagaaatcctgttgattcatgtaaacagcctctgccaaagaataacgtcccggattggtcaaccagtatttcaaaccaccccaaccattacgcccgtgccaagtggtcacgacgtaaccgatcatcgtggcagcattactaccattcatccaagcgatagccatactttctttcgtgttattcacgttaccgatcaaacaattacccacggcaaaaaacactttccgttttccactttccggcacatcccaagtcgctttcgttttatgatcattgaaatacaacttcccgtctttcgcccggatgtctcccgtggaataacgcacctgcaaatccttttccgtggcatgccatgccgttaccaccaagtccggatcacatgcagcatacatatccgagagtttcttcaatcgtccatccacggagacattacccgttttcacggcctctcctttgcctgccttctcgccccataatcccagtgtctgatcatccacccaagcgtaacggtcaaaccatttggcactctttaattctgtaatcgtagccacggcgttcttaatcaccaaaggttccgtgctgttgtccaacatcttcatcgccccatttgcatcataaccggtgatgataccccaaaggaaatcggcaaaaatgtcctcatccacctcacgactcacgtgatgcatatcaatcacgtaatcccggttcaaattctccggtttctccacgatagccacgtaacgcggtttcacccgttgaaggtccgccagattctcacgaggcgctttctcgtaaaaaaagacctccgcaccatgcttttcttttaacgcattaactacttgcatccacgctgcatcctgttgtacagccttggatgccaacactacatactcgcctccggcacgtccatttgctttcttcttttgagcaaatgaagacatcaccgagatcattaaacacaataaaattgataatcggtaaacttgtttcatttcgcaataaataatatat

SEQ ID NO: 730 - DNA, 1497 bp, Butyricimonas faecihominis
tattaaatgtgttaatatcatcaatcgatcgtttttttagatcaacagtctagaatcagtaaaatcagattatttgcgtggggatgaatataattcttccaaaagacagtttttacgtactgtacctgtttaaggatggtgcgtgaggcacatgggcataaaaagttaagcctgattctaaaggttagtgcgcgaagcgtatctacgtcaatcgtgatatataaattttttattaatcaatcacgagaatttccagatttcacaaactataaatatgtcagagggtacgagaacattgcattggtatgcggcgtacactaaaatcaatcaggaattaacgattaaaaagcggttagatcacttggagatagaaaattatctccccatgcgtgatgaggttcgtgaaacttcttccgggaggaaaaacgtgcgggtaatcttgatccctcatttgatttttattcgaacggatcaaacaacagctttctcgttactgaatgaacatggtttaaacgtcgtttacctgaaagatttagaaactcgtcatttgttgattgttcccgataagcaaatgcgtgatttcatgttcttgcttgacttttcagattccaccgtggaggtgattaatgaagagttgaagcgaggtgatcgggtaaaagtaatcaaagggccgctaatagggcttgaaggagaattgctccgcataaaggggcataaacgcgtaatagtgcgcctggaaggggtcgtttctgtggcaacctcttatattccgggatcattcctagaaaaaattaaatagagatagtggcgatgaatcttaatgatttgtacaaaaaagtatcggtcatcccaattggagatttccctccatctgcgttgtccggtttattgcatgggtatatctcaatctattccatcgtgcgagtaaacccgtggttggaagacgtgtatggtagccaatgggatatccatgaacggattcgtgaaatagcgggagaattagccgatctgatacaagatccatctattgcattggaagatcgagttggacatattgccgacttgatggaaacttatttgacctattccgacatggattttctggatatagctttagatgcagcttatgggataatatcaccggagggtagcgatgagattgtattaccttgtcgaactccggagatgtgtcggttgttgtgtagttgttattattttacgggggaggaggaatgtgcaaggctggcaaaggagataatgatggaatgggaaagttgtgtgaaaaaagcttctaagaatctggaacaattgaatgtatggaagtggcttcaggcagaggagttttatgagaatataattgaggaaaagaggaagggtgtacaactaggagatatgaatcttattgggaataaccttttggctgggttaaagattgaggagcaggatttgaggtgcgtttcttcatgttttgatgtattagcaacaaaagaatatatt

SEQ ID NO: 731 - DNA, 1496 bp, Butyricimonas faecihominis
taataataccgatccttcgtcgggacaactaaacttaaaagaggattctctttcattgcattttcaacactcatattcaaattttatttttcaagtacaacaacaaatttatcccgaaatatttattagacacatataaagaaaacatacaagataaaatcaccaataaacttcctattgaatatttcaatataaaattacctaacatacaaacgaccattgcgctgatggctaatcccgatacaacaataacaatctttacaaataaacggtcaaaatggattttatatagttgataaactacagttgtcataatcaacatatgaataacacccaatacagtcatagaaatacccattcccaacaagccataagattgataaaaaacaagactaacccctaactgcaatacacgatataaaatagctataattgtgaacaatttcattttaaattttgcgacaagaatcatatccacttgattagaacaaatagttaccaatgttccccaaatagccactcgaataaactctactgtaggcataaactcttttgaatacaaaatttggacaaagaatggtaacaaaaaaagaaaaaagacaactaaaggacaacaaagtacaagactaactgaagcttgcttatttaattctttttgtaataaaatattatcattattaatagcagcaatccgaggataataatccgtagtaagagcagtaataataatgccaaaataaccatttaaaatcataagtcctgcattataaaatccgacatcttgcaatcctccatgtgccctcatgtatgccgatatagtaagagctactatatttgcaagaaaagaagcaaaaaccaatgctattcccatttttatcatggatgaagcattcgttataacttcatttattgtcaaaacaacatgctcgtaacgaatctttcttacataataattagagaaaaacaatgccactaaagcacaagtaatcaatgacggcacaacaccttgcaatccatacaaataatacatcggcccccctacgacaagaccagccacggcccccaacatacttgcttttgccaaagatcttaactgcctcattcctttcaaaattgcaagttgtccatcagttaaaattctcgctacaacgactatagaaagaagcataaaagcaaacgtataatctcggtttcccaatgtccactcacttaaccaaggggacaacagaagtgttacaattcctcccaacaaacctgtaattattataactcgattcgttacagaaattgtcgaagagaaacgtttatcatcatcttttgcatttgcttctgatatatctctcactgcactttgagaaattcctaaactagttccagattttataaattccagagtattattatatatacccacaatccccatcccctctgcaccaagcaatactgcaacaattttattcgtgataacttttataagaatattaaaaacctgtacg

SEQ ID NO: 732 - DNA, 1495 bp, Butyricimonas faecihominis
ttattgggatttgccggatgcggcgatttcttggaagagtccagtaaggacgaagtacgtccatcaacagtggatgatttgatgcaggtgatggttggagagggataccccatgggaatgttggactatccttatacagatttgctttccgatgatgtgcaatgtaatggtgcgggaactgatgagactatggtaagtcgagtggaagaaattcgctctctctttctctgggaagatgatatgttcgagatattaaaggctgatggttataactcatggaaaaagtgttacaataagattatgggatgtaacacgattttggattatattgataaagtaacaggggaacaaacggcaaaagataacttgcgggggcaggcatacgtgttacgtgcttattactatttcttgttggtgaactactatgcgttgccctataattttggaaatcctgctgaaaatctaggtgtgccgttgaagttggaaatggctgtacatgatggttttatggcccggaattcggtggcagaagtgtacgagcagatcgtgaaagatctggaaaagggaattcaattgttagaagaaaatccggtggagatgtctctatataaaatccatgctttagctggaaagtctattttatgtagagtgtatctttacatggaggatttggataatactttgaaatatgctaatatggtattggaggaaaagtcgactttaacttctttagctagtatgccgacagatgctatgcagtaccaaggaaatagtgtgtggagtatttataattcgtcaacgagtgacgagattatttggatgtatgggggatcggggatgttctccagtttgtacccgtcggcctattcagcaatgaatccttttactccttctgatgaattaatggacttgtatgatttttcagctacggatgcgaataatcatggagatttacgggtatatgcatattattattggaatatgtatttgaattggtccccatttgaatatgttgctttccccgaatacgggtataaaggaggacggagtttatcgtatgcagcccacggaatccggactgcggagttgtatttaaacagagcggaagtgtatgtacgtaaattcatggaaaccggagagggaaatttccgaactttggctttggctgatttgaataaattgcgtgaaaatcgttatgatacgcggactacggcttacgaagaagttgatattaaggatgcggatgagttgtggcagttctatcaagaggaacgtcggagagagctgagttttgaaggacatcgttggttcgatctacgccgttacggtatgcctgaattatcacatgtttattttgtaaaaacgggtgaggcggaaacaattacgactttgcgcgagggtgaccctcgttacgtgttgccgattccgcaggtagctttggatcgtaatccttatttagaacagaacaaacgttaagtataaagttatgaaacct

SEQ ID NO: 733 - DNA, 1493 bp, Butyricimonas faecihominis
cttaatttacaactgaattaatttatgatttatgaattacgatttacaattaaaaagtaccaaccattcgagaccgaaatcataaatcataagtcctaccgtcctcccaaaattctcacatactccgcgtacgccaccttatactggtaattcgccgaaaccacgttcgtgtaggcttgtaaccaagtcgcctgcgaagacaatacatccagaatcggtaacttcccttcgttatagctaaaggtattcaatttcaaattctcccgggcaatttctagcgtagaattagcaatctccacctgtttccagttctcgttcaacttcacccaagcatttgccagttcctctttcacttgatcctcgactttactcatggctaactccttacttgtctccatcgcccgattctgtttcacgtactggcgtttctctccccagttgaaaataggcatactcaacttcgcaaaagccaccgtcgcaaacttctcgtcaccggaaacattaatcaatggcgtaccccacgtctccttcacccccacggccagctgcggcagatacttggaacgtataatcttggtctgttgcttggtcaaattaaaatcctgcacggcaatctggtaatcggctctccgtttcaaagccacttccaacgattgtaaacccggaacgatcaccggcttctggatcgagtcaataataacccacttttcctctaaaggaacccccatcatgattttaaacgactgcatcgctgtctggtaattcatattccgggtagactcttgcaactccgcctccttcaagcgggtcttcaccatcagcaagtcggtcttgctaatcgccccctcgtcaaaacgtttttgtacaatcccgtccaattccttcacgatcaacacgaactcttgggatatataaaacagactctcgttagccgccaacgtccaataactcacgtctgccgcgtaaacaatattatccgtcgtcaactcttcccccaaacgggcaatcgctttctgtaacttcgccgcctcttgctgcttgcgtaccatactccccgcgtacacgttctgcgacaatgccgcctccgccgaataattattgtgtttcagatcaaccccctgcataaattccacgtcttctacctgatacgaataattcccgcttaattgtaatttcggaaagaatcccgtttttacccctttcaacgcgtatatcgccgccttgacagcctctctcgattgcttgatgtcctgattataatccagcaccttcgcccggtactcctcgaccgtcaaggtctgcgctatcccgctccccaacgtcatccataaaattcctattataataacaaaaaccttcatacaattaaaaattgaatattgaaaataaactccctccccccttcggggtactccctctataaacagagggagagttaaaatactccctgtcttcgggaagagtcaccagctcctcctctgtttatagaggag

SEQ ID NO: 734 - DNA, 1492 bp, Butyricimonas faecihominis
gtttttaagcgaaagttactgtcggatcgaagtacggtaaccgtgacaatccggttatttatgattttattgttgggctttccgctattgacgagggccgggacggtggattccactcgtgtggcaaaccgggaagtgaggggaaaggtgatagacgagaaaaagcagcccattccgggagtttcggtacgtctgggaggaacatcaatgggaacagccactgatgtagatgggaagttcaagttattgatcccggctgacacggccacgctagtcgtttcctttatcgggatgaagacggaggacgtgaggattccccggttgaaagcgggcgtggaacagaaggagttgacgatcgtgttgcgggaagaggacgtgaaactggaagacgtggtggtgacgggtatcttcacgcgtaagaaggaaagtttcacgggatcggcatccacttactcggctgccgagttgaaaacgatgggtacgcagaacgtgctgcaaagtttgaagacgctggacccggctttcgccattatcgaggataaccagttcgggtcggacccgaaccgtttgccgaacatggaaatccggggaaagtcgagtatgttaggtttacgggacgagctagatgccgacccgaaccagccgttgtttatccttgatgggtttgagtcaacgttggcagcgattaatgatttggatataaaccgggtggcctcgatcacgatcttgaaagacgcggcgtcgacggccatttacggttcgaaggcggctaacggggtgatcgtggtggaaacggtgaaaccggaggccgggaaattgcaggtaagttataccggaaacatgaatctctcgatgcccgatttgtcgagttataacttgatgaattcaagggaaaagctggaatttgaattattggcagggaggtatgatccggtgaattggtccacgacgaacgaggtggaattaacccgtttgtataacgagaaattgaagaaaatcgagagtggtgtaaacacgtactggttggctgaacctttacgggtaggagtgaaccagaaacattcactctacgtgcagggaggcgaggggaatttcctgttcggcttgggagcgggatacaacgggatttccggggtgatggaaaagtcggagcgggatgtgatcagtggcaatatcgacttgatttaccggatgtcgaaattccagttctctaacaaattctcgttgacctcaactcatttcaagaacccgatcgtggcattcagcgcgtatgctgcggcgaatccttattacaaaaagtataatgacgagggaacggtggataaatggttggaatataatgattacttcaaagcttcgaatccactgtggaacgcgagccaaaatagtcgggataagggaagtaatctcttgttgaacaattatttcatggcggaatatttccccacgacggaatggcgggtacgtgcccggttgggattgacttacggga

SEQ ID NO: 735 - DNA, 1490 bp, Butyricimonas faecihominis
ttattggtctatttgtatgatttgctccgtacaaatagaccaaataaacccaataattggtatttttatacccataaacaaggaacgacatggaaacaaaacccacattcagaatcatcacccgacgcttgcaggaaaccacggcgaactcttttctcttatgggaagaagacgatcttttcccagcactgggatatcccgtgaagattaattttaccggaatcttcatctgttcagccggaactttagatgtagaaataaaccttacccctatgcgaatggatgaaaatcatattctcgttttcacccacgaacatgccgtgcgtatcgttaagcgtagcgaggacttcaaatgtgtcgggatcattctttccaaagcatactgggaagaaacattactccacacccatgcattcaacgccttgacccgcaccgtcccctgtcttccaatagaacccgatcagaagaaaccattactggattttttttccatcatccgcacgcataccaaattaaaggatgctgaaaaccgaaatgagatcatcaaacatctagtgattagcatgttttatgccgtcggagaagtctataaacagcaattggcacaaaaacgaacgacatcacaacacgaaaaattgttacatgactttctggaactaatctaccaacattacaagacccaccgagacgtggctttttatgctcaatgcctatccttgacgcccagatatctcacgacaacgataaaaaaaaccagtggaaaaaatgccttacaatggatagaagaatatgtcattcttgaaatccaaatccttttgcgtcattcagatatgacaattaagcagattgcttacgagatgaatttttgtgatcaatctttcctaggcaagtatttcaaacgaataaccggaatgtctcccgaacaatatcgtaatctgtaaaatgaacaagggaggtgtgacaaacgaccacacctcccacctatatcatctattcgaccggatccccttatgcaggaatcaacccggtaatcaggatcaataccaacaatcccaagatggcgtacaactccgggaacacggccaataccatcgtggttccgaacacgttgtaaccgctaccgattgccacgataccgttagcacatacctgtgcttgacgaatagcagagaagaaagccactaaaccaagtcccaatccggcaccgaagatagctgaagcaggcccccaacccatatccacgttcgtcaagaaactacttaacaggaaatatcccacgaaaccatacaatccctgagaggaaggcaacgcggacaaaccaatatactgacccgatgcagtcgggtttttcttcaaagcacctaccgcggcattaccgcaaatagtaactccatacgcactaccgattcctgataatgccaccatcaatgcaacacctagataagctaataaaattggttccataattctaatctatttaattgttattt

SEQ ID NO: 736 - DNA, 1490 bp, Butyricimonas faecihominis
agtaataatattagaggcaattacaagaatataatttttttgatctgcacgaaacaacactctcggataaccaaaaaagaaatttgcaactgcaacaagaagaaaaacaacgtaagcaatatacgaactcataattccaacttcagacttagcagtcaaactaggaattaaaggggacaacaataaaccaataagcaaaatagctaatgcaacatatcgaaaaaaatatcgcataagccacattaactcatttatacgggattgatcattctctgcaagaggcttatataaagctacagcaaccgatgatgtaactcctaattccattaaaaagaggaaatcaatcacactcattaatgtcgtattcaatcccaggtattctgtacctagataaactaaaaacatcttacgtgcaacaaaattcaccagcacggttaagataaaaaaaagcaatgttattccgctatttaatgctgttttacgtaacctaatcattcctattaatttacactatacccattctctctacattaatctctcgcaaagacccttttcagtattaaccaaataatcccactaaaaatgaaaaggaaagtaaagacaaaaacaattacttttctattaggcttatctgcatttaatgcaacctttgcaggttcaattatagaaaacaatgtacgttcctctgtaacctttgcttgcaacatttcatactgtcgagcaagcatattacacaggttcaatgacatttctagctcaatttgaccacgactaatagttccctgcctatctttcgccacttcataattatatttagcttgattgtacattttttctgcataccccatatcattcaacatttttgctttttgaatgctcgaaacataagtttgaagtttattaatggtactatccgcaatcaatgcagcaacaagaggatcttgcatgtcaacttcgatatttaccaaaccactttttttctctacccaaacctctattttatcattcatcacatcaagatacatttcctgccaataggtataataaaaaggatcccaattcaaattactattttcatctgattctagacgtgttgaaaagaataatttcccaaataattttaacatcgaattccaccaaggcttcttttgctcctttgttatatattcaaaaagactcatttcagataaaccattaggaacaaccttcatttgtgctaaatctactaaaaaaggagtactttttacaacaacaggataaaaatctaaggcaatatcttctagggaagaattattaactgttaaacctaacattgacgcaaaagaagcattcttgtctgcacggtcatttttagaggcataaggaagtaattgaacttttgtactgtattctttaggtatacttaaagcaattatcacccctaatataactccagcaactgcaaccttacatacaaaatagcgcctcaaccaaatatatctacataaagc

SEQ ID NO: 737 - DNA, 1470 bp, Butyricimonas faecihominis
gatatacacattatttatcttattgacaatctgttattcttgtgatagtttcttggatgttagaccgacaggagaaattgtgaataatgaattgtttgaaactgccgaaggatttgaagaggcaatttatggcgtctattcttatttagcgagagaacctctgtatgggaaaaatatgacgtatggtttggtggatgttgtcggacagtatttttccggaggatgggatcagcactggtctaatcagttgcggctttacaattacaaacatatggaagtgcgcccggaaatcgatgcgatatgggaatccatgtataaagggatctcttacgtgaataatatgctggagaatcttgccaaacatgattctacaaaatttgccttgtataatgtttataaagctgagggattgggattgcgagctttcatgcattttgaacttttacgtttgttttcagagagtataatacagaatccgaatgcaacgggaatcccatatcgtgagaattatacttaccaagtaaccccattcgatccgatcaatgagtcttataataagatcattcgtgattttaaagaagctgaaagattattagctgctcatggagagtattttgatcgggtggatgaaaatgctgggggattcgtgaaggatcgtgtgattcatatgaatctttatgcagtacaagctttacttgctcgtgtttattgggaaaaaggagatttagaaacagcgaagaattatgccatgaaagtgattgattgtcctttcttctcgatggaggataagacaaatgtggaggatattatgaacggtattatttctgataaagaaacgatttgggggttatattctgaagaatttcctaattatacgcgggatgtaatgtattctagtggtggaaacaattactatgatccgaaaccggattatagggagatttacgaggttgaccaagacgggtttgattatcgcttggataagtggttccagactttgtctgatcatggagcggaaggtttgcggtgtatgaaagtggtagatcgttttaaagtacgattaaatactcgtcccgtggctaaattaagtgggattaacatgattcgattaccagagttgtattatatcgtgtcagaatattatcttgtatcagataatatggaaatggcagcgacttatttagataaagttgtgaaggctcgcggtttaaatggctttaacaaaggggatggcattgttgttgtgtcgcgaatgaatattaataatgatcgccgtaaagaattggtttgtgaaggacaatggttccagattatgaaacactataatatgtcaatttatgaatcaataaccgatcaaacattccaggcctcaaaagatatttatgtgttcccggtacctgataatgagtatgaatatagaaattaatatgaatgttgttatgagaaaattattatacacgagtattactg

SEQ ID NO: 738 - DNA, 1464 bp, Butyricimonas faecihominis
gagagccgtgtacatggagacatgtaagcacggttcgggggcaggctcttgaaaacctaccgtcgaaagacggcaaggcattgagtgccgagcctacgcatatcatcttccccgccgccgtccgctacgtggatttgggaagcaaccacatcatagcgggcaaggcggacggtgcggagaacgtaatccgggtgaaagccacgacagagggctttccgggcgaaacgaacttctccgttatctgcgaggacggaagtttcttttcattcaacgccaagtacgcccgtgaaccggaaatgctcaatatcgaaatgaaagacttcttggagaatgaagatacgtccgacttctcacatacccgcatgaacatctatttccgggaactgggtaatgaaagcccgctgctggtgaagctgataatgcggagcatctacaagaacaacgaccggaaagtgcgccacttgggtagcaagcgtttcggcatacagttcttaatcaaggggatttacacctataatgggatgctctatgtacacacgcagacaaagaacagttccaacgtgcctttcgatacagacttcatcaagtttaagatagtcgataagaaagtgccgaagcgcacggctattcaggaaacggtgctggatgcggtacgcagctacaacgaggtgatagagattgccgggaaatcgaccgtgcgcacggtgtacgccctgccgaagttcaccattcctgacgacaagctgctgttggtggaactctacgagaagaacggcgggcggcatcaggttatccgggtggaaaacgccgacatcgtgaacgcagaagtgattaacgaactcaaaatcaaatagggaatgaagaaacatatctttataatgatgctctttgcgctgtgcctgcatttcaaccaggcacacgcacaaagatacctgccgggcatgaaaggcttgcaggtcacggcgggcatggcggacggggtgcattggaactccgacacggatttcgcctaccatatcggggcggcgtacagcgtttacaccaagaacgccaaccgctgggtgattggcggggaatacttgcacaagaagtatgactacaaggatatgcagatacccgtagaacagttcaccgcagagggcggctactacctgaaattcctatcggacaggcgaaagacctttttcctgtcgctgggactgtcggcactcgccgggtatgaaacaagcaaccgaagcgaaaagctgctgccggacggctctacgctgctggataaggactgcttcatttacggcggtgcgctgacgctggaactggaagcctacctgactgaccggatagccttgcttgtcagcgcaagggaacgggcgttgttcggctcggacataggcaaattccactcgcaggtatctttgggactgaaattcattatcaactgaccgctatataacaatgtatatgaag

SEQ ID NO: 739 - DNA, 1459 bp, Butyricimonas faecihominis
gtgtgataggatgggaataggggaggaatgggagcggaatgggagcggaatgggagcggctcgcaatatgattcgtgtatgattgaaatttagtaataataatttacatgaatttgtgaaaatttaggattgaactcgactgaagttaccttactatgatggcctaccccctccaaggggctgtcctaaaagtcattttatttcaaaaactcctccgtcacttcgtgccacctcctctataaacagaggaggagctggtgaatcttctcgaagacagggagcatttcagctctccctctgtttatagagggagtacagtgaagccgggagggagttggaaaaatgacttttaggacaaccccagttaatttccaaatagtcaccgcttttaataagctaaccgtacgttatctacccaaagtttatttcccacggtgccaatgtaagcctccccgtaactagaggatacacgcaggaacaaatgggtgggtttgtcgtccgtatctccccaacctacttcttccacgggtacggatttacctttactgttgatacagtatagagattgttctttggggattaattgcatataggatttactaccggcctgatttgccgggtccccgtaaagaatattcagcctgtggtcgtttttccagtcgggagtgttttcggaaaggcgttctatggctgttccgatccgtttggcatacacgttaccattcttgtcttcccaacgtttttgaaggatcacgtatatttcggcggaatcccgtcccgccacgtcaacaattttgctgaaaccggttgctttgatccggtgatctgttcccggggtctccatcttgtagtcaaatacaactgcgttcggggtttctgtgaaaggaattccggcgttcagtttactttgcgggttcttcgtgtctttgatcggttcgtgcatctgtcccagataaattgtacccggtacaagcacggtgatgttcacgatgcccagtactttacacttttccatgagcgtttcgacacgcacgcagtagccgtcatctcttttctccgggaaaacagagatactgcatttcgtgactccactgacttttgccatgacgttagaagttctccacggggaaaccgtggaactgatatagggtttgtctcctcgaatcgtgtccaccggggcaacctcgtagagggttttcgtgttaccaccaatgacaaatgattcgtcaatgattcgaaccatccagctattgaagtccccgaatgggattaatttttcattttctttttctgtcgtttgtgccatggatagaacgcttgttcccagaataattcctaggcatagcgtttttatagtattacgtgtaaattgtttcatatcaattgattttcttctgtcttgaatacttttattacgataaaatgactttaaggttttatgcaagaaacatgccagtgt

SEQ ID NO: 740 - DNA, 1441 bp, Butyricimonas faecihominis
atattatttacgtatgaaaaaacaattatttttaactgccctggctgcatttgccatggtatcgtgttcggaagaaaatgtgttggataccaacaagggaaatgcaattaatttccgggctgccatgggaacccgtgcctcagaaatgaccacggggcgtatgagtcaaatttacgtgactgccctgaccgaacgcgatgaaaatcttttctcggacctattgttctcgaaagaatcatcaacaagcttctttatttccaatccagcttatcattggccgggagatggaagcaacctgacattttatgcctactcgccttcaaaaaacgatcttggaggaacgttgacaatcaattctacgacccagaaacttactgatttttcacctgcaacagatatcaccgatcagaaagatttcgttacaatcaagactaccggtaataaaacaaatgaaacaacaggcgttcagttgcaattcgagcatcggttggtccagatcgaggtcaaggccaaaaatgcaaacgagggttatgtgtacaaggtgaaaggtgtgcgtatcggaaaacccgtttctaaaggaacgttcgattttgatgctgccacatgggagttgaagtcagagaaaaccaattacgaggtcacctatgacgaagagaagacgttgaatggcacgtctgtttccattatgaaaacgtctggtgacaacgccatgttgattccgcagcaacttactgcatgggatgctgctacagacaaaaccaatgctgcggagagggcttatctggctgtgaaagttcaaatcaccacagcggcgggagcacgtgtctatccggttgcctccggtgttgattatggctgggtggccgttcctatcaacacgaattgggaacccggcaagaagtacgtttacacgctcgacttctcgaacggggccggtaaggtcgatcccgagaaggaggatgacccaacgcatccggaggataattacaagcccggggacgatattttgggcggagcgatcaagtttactgtaaatgtgactgcctggacagagcaagcacagaatattaatatgtagaaaaagaggctgcccgaaaggatttttttctgagaattgaaaattttgggaaagtctccattaggagtacggataaaacgaggacgactcaggtttttgagttgccctctcttcatcgcagaatacatgaaaatagttactgacaaagaaaattattatagaatgagtaaaaaggtttgtaccattgtttcaaggggcttttgctcatccggcgcgtgcttttgggtgctgtcgattgtaatggtgttgctcggttcatgccgggatgagccagtaacacccctgtttccgggacctgaaatctgtttctctctgtccggtaccccggggcagccgattacccgtacgggcggggaacgggag

SEQ ID NO: 741 - DNA, 1438 bp, Butyricimonas faecihominis
agatgagtataagagaaaggttaaaatggcggctataatcgggcgataaggcggcgatgatcgggcgaaggcgcctaacaggcaggcaacagtctggtaacagtgaggcaattcggataggaacggcaagtaaaacgattattttagtgtaggaaaaaagttggaaacgtgatggaatctgaaattattactatatttggaatggcggaaataaatccggtacgtgaagacatcgggagatgatttttgccgctaatgaattgaataatactagtttatcttcttgtataaggagatatgtccgatagaaaaaagaatgattaagagttaagaaaattaaatattagttcaaaagagatggaaaaatatctgataccgttagtgccgggacctgttgctgtccctcaggagattttgaaagttgctgccacgaatttcgggtctgccgattttgagccggagtatttggctttgtataaagatacggaaaaattgttgcagaagatgatggaaacccgtaaccgggtggtgattcagacgggagaaggtatgttggtgttgtggacggctttaaaaagcacgttgaaaccgggagatcgggtgctggtgctttctaccgggttgttcggcgagggattcggcgatatggccaaggcgctgggatgcgagattcgggtgctggatttcggttatgatgagacgattcatgactttgatgccgtggaaaaagcgatcgtggagttcaagccgaagatgatcacgatggtgcagaacgaaacacctagtggaacgacgaacccggtcaaggaaatcggtgatttgaaagtgaaacacggggtaccgttgctttgcgtggacatcgtttccggtctggggggaaccccgatacacgtggacgattggcatgtggatttcgccttgggtggttcgcaaaagtgtctctcggccccggctaatatgtcattcctttccgtgagtgaagaggcatggaagatcgtggcggaggtgaattacgctggatacgaggccttgttgcctttccggaatgtaaccgaaaccgggtatttcccgtacacgccctactggcagggaacagcccagttgcataaggcttgcgagttgattttcgaggaaggggtggagagttgcattgcccgtcacgagaaggtggctgcttactgccgtgaacggattaaagagatgggattgaagatataccccgtggaaggagccgtgtgttccccgacggtgactgcggtttacgtgccggaacacatgacttgggaacgtctggattcggaattgagagtgcagggtatggtcgtgggaggcaattatggtaaactggccgggaaagtattccggatcggtcacatgggttctcaagcgaatatcaacctgatcaaggaggcaatggatatactggaaacagtagttc

SEQ ID NO: 742 - DNA, 1438 bp, Butyricimonas faecihominis
ttcatgttgttctgctcttcagtttgtgtagagaatcaagtgtaatctaaccgtgaagtaatcgagaaactacctctcgttcgttgcttattcagagcttaagcggggcttattctatccgggctgcatgagccacgagtaagctctgaatcagtttcgaaaaagaggtattttctctcttaattctcggtaggattcctattacttcttttcaaatgtatataccgccctgaattttgtattttcccactagatataaacactgataatttcttacctttgtaatcaactaaaaatatggcaacatgaatagcaagttggttgatttattaaaagaagtggatttattgaaagtgcggttatcatccttgcgtcctttacctgttgaggcgttaaagaaaatacaagatgctttggatatagaatacacttacgagagcaaccgtatagagggaaacaccctcactttacaagaaacagcacttgttgtgaatgaaggaatcaccatttctggtaaatccatgcgtgaacacttggaggcaatcaatcatgcagaggctattgactatataaaggaggttgcccaacaggatattgaaataagccaaaggacaatcaaggagattcatgcacttgtgttacatggcatagatagagagaatgctggaagttatagaaccgtacctgtaatgatctcgggtagcacacacgtaccgtctcaaccttgtttgttagagaaactaatggaagatttcatgcttgcatttcaaagcatggaaaaagaaaatattcatcctgttattatcgccgcttacttgcatggtgaactggtgaggatacatccatttatagatggtaacgggcgtacttctcgacttctgatgaatctttatttactgcaaaaaggttatactatcgttactcttaaaagtgataatgatatgaagttacgttattacaaggctttggaggtttctcacacggagcaacaacatgatgatttttacttgctagttgccgaagcggaaaaagcttctttggagaggtatatttctattttagaatgaaaaataacttcatttgttagaatgtttctgtaattaaagatattcacgtgtgtaatttccttgtatggtaaagttggaaatagaatgtcaaatcaatatattatcatacatataaatgtttgatattctgcaatattcatttggtttccttgcttgcaagtagtacctttgcaacacgtgaacgaacaacctgatttacttactgttgtttgcattcttgtttgttagaaattcttggtaaagttatccatatattaacgctttggtttgctcgatattttctttcaagtaatggttacgaatggcgtgttcttctagcaaatcaacttctcttcccaaaatatcttctaaagcgtatttcagatcaaaga

SEQ ID NO: 743 - DNA, 1431 bp, Butyricimonas faecihominis
ataaaatcttttctgtctcctttttaagttctgttatagaaaatgtcctaaacttccatcttgacctttaactcttcattcaactcttcatctcttcccaacaattgccgaacaagttgataaacagtcgtacatgggttgtgatttgcataacgggtgtccgaagcatattcaaggtgctttgcttctgcatatagtatggcggaatccattgaaccataagtagtcattatcttataattgttaggatctttcttggcatatctgtactttttcttcgatttatatttagaagaagcattcacagcggctgaaatcttctcttcataatcctttcgtgggacacctgttgtcacattttggaagtgatacaggtaccacaattcgaatgcttcattgctccaagccacctcaatgccattcttttgtcccattgcaatggcttcgttgaaatcctttgcaggaaattcatccttatcgaaaacagcccaaacacggtcatagtgattcttgtttttaaggttaatggccttctccacaacatcctttgttccacgcccaagccctttcacctcgatgtcatatacaattaccccctgttgcttttcagtaaatgcctcaaagtaattaggctcggtcttagtcccttcacacacaatcagaacagaacagcgtatgaccttctgctctctcttttgcgattgcctcctgaattttgaagaagcattatctatctttattctctttgctgccataaccttacattattaatcattcaaaatataaggaatggcaccataacgaccggtgatatagtttttctcataatttgcatcattacgaggtttggtcccgtcagggagtacgatgtcaatcagactatacaagtccgtctgctctttagaatctttctctgtaaaccatatttggtcacgtctgaggattttctgagaaagcagatgcgtatcatgagtggtaaatatcaattgtgcattcttcggatttgtttccggattattgaataattcaataatatactgagaaatcagagggtgcatctttgcatccagttcatctataacaagtacagctccggaaaaaagcgtttcaaatatcggtccggaaaggtcaaacaacttatttgtaccggaagattccctatcttcaaacgaaaagtttattgtacccacaatcttacctttatctgaatatacgttatgtatggaatccaactcgatactcttcttaccttgcgtttctctttggaatagtgctcttagctccaaaggcaagtcttgaggaacattgggttcttcctcatgagtaagaatgttgttaaatccaagtctcaatttctggaagaagttgagagcatcaatactcaaagactcttttttatggaaaaataattttgaatatgctctatattgt

SEQ ID NO: 744 - DNA, 1428 bp, Butyricimonas faecihominis
gtactgaattcttgctatgaagacaaaggtaattatagttataattgggtgcaggatatcgatttgacagaggtattgaaagatacgacggttgggcgtggtcatgtgttgtatcttgaagtcgacttgaaaaaacaagttttgggaacggagggtaagactgaggtcgctaatccggaggattatactttcgaatggaaggttatcacgggtgatggagatgtggtgttaagtactgagaaagatttgaatgagacgatagacttggcgagcggggttagttatcaggtaaattatacggtaacagaaaaaaagacaggagtatcttggatcactgattttaaattgaatgtggtcgaggaactgaaaggtggatttatctttatgacggaagatgcagaccgtaaagttgatattgaaatctatgcagatgatacggaaggaaataaggttcatcggaccggtttgttgagtggttcgggattcccttatttgtccggaggggcaaattccatcgtttatacaaacgtcaagaattggggcgggaaaaggctatgggtggctaccggagaggctaccggttggttgaatatgcctgatttttcatgggaagagaagaatatgttgcgtatgattatgttgacaccccagccggttagttatactatgaagtccatgtattatttgtcgaatcaatttatgtatttctttaccggggaggggaatgtgcatcttttgacttctaggagtattctttcggctgatgttacttatgtgaataataaaaaattcaaggctgctccttattatggaggtgctagtagtaatgcggcaattttatttgatcaggatcggggacgttttgtgtcctatgcaatgaagagtggtggatttgttacagaatcctgttatgacatgaatgacgagtcggcacttccgaattcggatttgttgtacatgcaacgggtgacgaatgaggggacagtagcaattgtgaaagatgaggatgggaaatatcagcgttgtcagtttagcatagaagaaaatccgacgggtacgttcaagggacatttggatcaaatggaagagttgaaaggtaatgcagccatgatcgagggggctgaatacacggttattgattggatgaacggtttcttgtatttctctgttggtaataagctatatacttaccgaaaaggaattgatgaatgtgtagaagttaatgtaccggatgtgagttttgatgctatcgtttctttgaatgtagttacgagtggtgattatagttcgaatatttttgttgcaacttatagcgaggcgaatggcggaaaagtgtatcggcttactccggagagtaccgatagccgtaatttgaccgtagaggaagtgattgacacggaaggtgctgtaaaatgtataacttattgg

SEQ ID NO: 745 - DNA, 1426 bp, Butyricimonas faecihominis
actaaagaccataattgatttttcatttttacatcttcatatttttcttatttaaacatttgaaaataagtagtttcatactgtaatatccatttttactttttttattcaagttagatttatcggctcattttaaaaacgcaataaacgttcgtttattgatttttacaatcacttgattcctagtcattcaccttatatatcatgatactacgatcagcttgaagcgaataagttatttcattagttaatttcaacatatccaatactttaagcacattttcgtattttcgtatttctccagagaaacgataatcatacaaatcaggggtattacaaacgattgtaatatcataccaacgagataatttagcaatgatagacctgaaagattcttgttcgaaaaaaaatatcccgtctttccaagctatcgaaactcgaagatcaacctcacacgttttatattcctgagttttcaaatctatacagaattgaattcggggagtcaattgacttatcaagaattcgtttttctcaatattcacgcctccttccaccaaagtaactttacactccggttcgttaccataagccatgacattgaaagccgttcccgtcgcccggatatcaataccacatgccttcacgtaaaaaggcctagtcgtatcatgggccacttcgaaatacgcctccccttctaaaataacctcccgcttgttaccgggaaatcgaaccggaaatatcaatttcgaatcagaattcatccatacttttgtcccatcagccaacgtgatttggtattccccaccccggggaataaacaatgtattatatcgaatcacagaatccaaaggtatactcccctcatcttgataagaaacctcccctatttgagtgttccggatcacgattccatcctcttctttcaataaaagttgtttatccaaaaatatctcattcccattatctagcttcaaaaaagctttttttcctcccgcttctatcccggattgtacaacaaccgggaattctacaggcttatcaactaaaaaccaaattaccggaacactcgccataacgatcaacactaccgcagcataacgtaacaattgtaatctcctgtttctatcacgctgtcgccgccaaacaatgaaatcttcccacgtgtgtcgtttattgatttcttcttttaaaacagctttttgggcaaagaaatgaggatcatttagatctttcattactttctcgctcgacttatatgtttctcgccaaatcttaatctccgaatccgtatctatatcggatggctctagtatatgtttgccaagtcttcgtgcgattcttatccatgattgaatatccaatttcatatcaaatattttaatccttttaagtataaaacacttcagaaagaaaacagaatgac

SEQ ID NO: 746 - DNA, 1420 bp, Butyricimonas faecihominis
aaagcattttcaattctattttctgttacaagtttacttcaaaaaactgtaattcctgtaatagttttacttttttattggcatcccgggaattcccgggatgccaataacacttggcgtcaatacatgaccctggcgaataactcttttttatcgcggtgtgcctggtccggaactttcaacccgatagccatgtgtggtcttctggtgttgtatatcccgatgattctctccacttgcattctcgcctggtcaatatctctcaagaccatatcgtttaaccattcccgtttcaaaatcccgttcactctctcggcgataccgttatcgtaaggggagccatcttgtgtcacgctgacttgaataccgtgttctttcaatatcccggtgtacagcgaggagcagtattgcccaccccgatccgagtgatgaacaagcttatcgctaaagttgggaggtagcgttgccaacgcccggcacaacgccttcacgggaccggacgagtccagggtggggtgaacttcccaccccgtgatccgccgggaataagcgtcggttaccagcgagagatacacgaaaccggcactcgttgacaggtacgtgatatcactgacccatacctggttggggcgggtaactcgaagccctttcaccaggttcgggtactggcgatgccacgcccgggaatccgtcgtgatgacccggtacttcttctgttttatcattaaatcgtgaaggtgaagtaaacgataaagccaatcccgaccgacgggaagcccgttagaccccagcatgttccacaatttattaaccccgaggttaggcatgtcacggcgaatatcctggacgatggaaagaacgtaacgctcgcgttcctcgcctccacgatcggcacggaggctcttgtaataagcctgcttgctgtagccaagggaattgcaaaggtgttccgtcacggctttacctccccgctctttttgtctctcgacaatcccgctaatagcatctcctcgtagtttttttttacatcaacatgcaggcgttccctggctaactctagcattaactcgtaagcttccactagtattttctgtttctctacttcctgacgtaaagactccagctcggcgcgttcttgatcggtcatcgggtataacattttgtaattacgcgaagataaacgtttgtgttgttcttccgataaaacgcgagatttatacttgtgtagccaaacgtgaaaagtcgagggtttgacctcgtacttggctagaacttccgcgtaacccatttcattgattattcgatctcgtaccgctgataatttcgtcttcacggcgtaataacgacgacgaacagggggaaaatttaattctgacattggtttactaagtttactgtaaacttttttcaggacaataca

SEQ ID NO: 747 - DNA, 1418 bp, Butyricimonas faecihominis
taataacccgccgaaagacccctttttatttgaaattttatgttttaccgttacctacaaagtaacggtaaatttaaatagtgtgtagtaaaaatttttgatgacattctgtcagatttcaaatgttaggtaattttaaagaatgggttatgaaaaaaagatttagtttattatggtcattgcttgcaatggtagtagtgtgtgcttgttcaaagagtggtggttcggattatccggatccagaaaaagccggtttaacgtttcaagttacttttgacaaaaccggaatggaaggtagagctccgcaatccacggcaattccagaaacttcatggtcaaatatcaaacaattacaattcttattgtacaacacgtccggtcaagtggtttattcaaccatcgtgaacccgacaagtgcattgactactttcacgtacacggacgtaccggtaggtaccggttacacgttagttgctgttgcgaacgtgaaaagttcttccgatgcaattaccacttatttagatggaggtacaactccaacggaatggaccatgtggaatgtgcgtcagaagactctcccgaatttggtgatagagcataaagcgggagacttcccgacattctgttcgtctaaattgaccaccgcgggtaatactgcttataccgagccgtcagaaattttcatgggagcatcagcgagttttgatgttacaaccggaattactactacagtaccggccattgctctgaagcgcgaagttgccatgttgcgtgttcgtttgaacgtgaaggatagcgagacggataatttgaacacggttgatttcacgaaagacgcgtctatcatgatctatcgtttacccgacaacatgaaagttggggctgcaaacgcaggtggtgtgagttcaacgtcaaccgatgccaatatattggccgtgaaggacggtactattttcaacacggctaatcctacttcaggatatgatccgaaggttattttgggtggtaatttcaccatgtggagagatattatcgtgtggccgaataatggaggacgtgctgttaatggtgcatcaacagcggaagcatctaccgatcggcagtactttatcgttgtttccggacgtggagcaacgggtcatattttggcaaacggggatgaaatggccgctgacggtccggtttactggtccggtttgatcaaggagaatttcacgccgaacacgattcgcgaagtgaatctgaccttgcgttcaggaggtaccacggacgtaccgaccaagcctagagaagaaggtggtttgacaatcagtgtcggtacgccggaggcttggagtagtaatatcgtggaatcagcacttacactgtaaaagaattcctttttatacactcaagatgattgcctgggagcgggatcc

SEQ ID NO: 748 - DNA, 1418 bp, Butyricimonas faecihominis
ttataatttttatccatttatcgtattttccacctcttccacggtaatcggcgcccgatgatcacccatacatttacacccgttctccgtgatcaaaatatcatcttccagacggataccaccgaagtccttgtacgtctcgatcttgtcatataccaagaattccttgtgcaatccttgttctctccactggtcgatcaaagcggggatgaaataacaacccggctcgtcggtaaccacgaatcccggttgcaacttacgccccatacgcaaggaagaagtaccgaactgatctatcggacgagtctcgtcgtcataacccacgtagatttgtcccaagtcctccatgtcatgcacgtcaagtcccatcatgtgacctaacccgtgaggcataaacaacgcatgcgctccggctgccacagcagcattcacatcgcctttcatcaagccaaggtctttcaacccttgagccagaatcttgcatacttccagatgcacgtactggtacgtcactcccggacgggcaatctccatcgctttgttgttacaagccaatacaatattatatacatctttctgacgttgatcgaaacgtccacccaccggaaccgtacgggtaaaatcggaacaataattcatgttattctccgccccggcatccgtcagcatcatacgtcccacggtcaatgtcttgctatgatcgtgattatgcaacgtctcgccattctgggaaaggatcacagggaaagaaaccatacttccgtaagaagcggcaattccctcgatcaacccggcaatatattgctctttctgtcccggtaacgcatgtttcatagcagccacgtgcatctcgttaccaatgttacaagccaagttaatttgctcgatctcgcaagcctccttcacggaacgcaatgccaccacggccttgatcaattccaaagaagaataattcttgatcagcgagtgatgaatacccaacaaatcctccaacaataacatgttgtgataacgataaggcggtaagaaatgaatcttgcgtccatggctgatggcctctttcaaagccccggccaatttaccgaaaggagcggaacaagtcacacccacgctggcagccaaatccttcacgctcggttgtggtcccatccaaataatatcgtccatgtccacgtcgttcccgtacagacaaacgtccccggaatccacgtccatcaacccggcaaacccgggcatgttcaaaccaaagaaataaaggaaagaactatcctgacggaatttatacgtgttagacggataatttgcaggagcttcctcattacccagtatcaataccaagccgccactcatcttgtcgataagttgctttcttctatttacatacacgcttttatcaaacatatttattatttatttaa

SEQ ID NO: 749 - DNA, 1413 bp, Butyricimonas faecihominis
gattataggaatgaaacatgtattattgattatcggaagtttgttgctactgtcggcgggaagaggggtatgggaggaggaagagaaggtggttttgagggaggagcagcaaaagttggctgttgaggtgttgtctttgtatttggaagtggatagcagtaggatggcagagttggtgacttcgagtcaagtggtggattcccttgtgggtagaggggaaaatggagaaaagtttgatccggcgtttatttatcggacggtggcgcatgtggattccatggcaagaacggggatagaactggcgatgcagaacaaaccttgggcattgctggagctattggagaaagaaagggagaatttttatgtccatccaaataatgtgatagagaatgaactgggattccaccagttgttggtagtcctttatcaaatgtgttatggaaatacaaaaacggcgtttaccaaaatagtgccgttgatggaaataacgcggcttcatatttatgcctgggaagttatgaaaggtgaggaacatccctattatatagatgttctcgctgatttgttaagatgctgtatctgggctgaagagtatgaaaaagcgattgaagtgggaaaagaatggtgtgggcgtatggaagaggatgatgaaaattatgttgccggcatggtggttttggggaaattgtatggtcaagtgggtatgataaacaaacaaaagcgttgtttccgcttgatgaagaactctcctttgtttgagaaattgaatgcaatgtcgctttcggagctttgtgaataggaaagaaaattcaagaggctccgtttattaccatgcactgtgattatatattgttcagcaattttcttaaataatattaaaaaacacctagccttacattattggatgtaaagctgggtgtttgttttgcaatttgttgatttacagtattcatttcagagagggagggatcaatgaccaagtgagcaaagatgatataaattatcttatccaggctaagcgatatcgaggttacgtgaacaaagatcatgttaaacaatttattcttttggcgaatcaaagaagatatcccgaactgtttattcataccgggagaacagggaaaagagttcgagaattagtgtatggaacaaatgttcagattatttctggaagtgagcttatacagctattaggtcttgattaaattggaataaagtgtaattaaataagaatcggtcgggagagttgtgtgcgagataagtggttgataataaatgcaataaaatttaagtatacaggtattgtaataataacaaatccctagcgagccagttagaataaagaaatggtaatgattatgaaatatagaaaagtatttttacagtatgagctaattgatgaactctattatt

SEQ ID NO: 750 - DNA, 1390 bp, Butyricimonas faecihominis
gatttaatgaaagtttaacgtgcatcgttaagagtggtctttaaatttttaattttcaattaagggagttacttttgtctgcttaaagaaacgatatgaaaaggaaagattttgaagtgatggctccggttggttcttatgaatctttggaggcggctttgcaggcaggagcgaattctgtttattttggagtggaaggattgaatatgcgttcccgttcatcggctaatttcacgctggatgatctgaggaatatcgtggaacgttgtaacgtccgggaagtgaagacttatctcacggtgaatacgattatatataataacgagctggagaagatgcaccaagtgatcgagtgcgccaaggatgctggggtgtcggcgattattgcctcggatattgcagcgattttgtatgcccgttcgataggggtagaagtgcatatcagcacgcaatgtaatattaccaattacgaggcggtgaagttctatgcccaatttgcggatgtcgtggtgctggcgcgtgaactggatatggatcaggtgatgacgattcatcgacaaattgttgaaaatgatttgcgtggtcccaagggtgaattggtccagatcgagatgttctctcacggggcattgtgcatggcggtttcgggtaaatgttatttaagtctccacgagatgaatgcttcggcaaaccggggggcttgttaccagatatgtcggcgttcttatacggtgaaagataccgagagtgatatagaattggaggttgatgggaaatatatcatgtctcctaaagatttgtgtacgatcggttttattaataaaatgatcgatgccggggtgcgggttttcaagattgagggacgtgcccgtccggcagaatatgtgaagacggtttgcgagtgttatgacgaggcattgaatgcttatcttgacgggagttacggggcggagaagattgcgaattggaaagagcgattggctaccgtgtttaaccggggattttgggatggttattatctgggccagcgtttgggcgagtggagtgaggtgtacggatctaaagccacgaaaaagaagatttgtatcggtaaagtgacaaactatttcggtaaattgcaggtcggagaatttaaactggaatcttatgatttgaaagtgggagaagaagtgatgattgtcgggccgaacacgggagtggtacagatgattgtcccggagttaaggttggagctggaacctgttgagcaagtgggtaaaggggctattttctccatgccatgcgaaacgaaattgcgaaggtctgataaattatacaagttggtggatacaacggaggagttgatgcaataaaaaaatgccgattgttaaatcggcatttcttttattat

SEQ ID NO: 751 - DNA, 1389 bp, Butyricimonas faecihominis
ttattatttggggataaaaacttagaattctttataaattggggctatctaaaaagtcttttttcaaactccctccccccttcggggtactccctctataaacagagggagagctgaaatactccctgtcttcgggaagagtcaccagctcctcctctgtttatagaggaggtggcacgaagtgacggaggagtttctgaaataaatgactttttagatagcccctcgtcgattaatttctaatggcggcgatttctttcacggcctcgatggcggtgttgacgtcttcttctgtcgtgaaagcaccgatgctcatgcggacggttccatgaatgtcgaaggtaccgatgacctcgtgtactttcggagcgcattgtagtcccgtacgtacggcgatgttgtaatccacgtcaagcatggttcccacgtctccggaatcgaatccgttgatgttgaaacttaataccggattctggttttcgatgctatgggcgcaataggtagttacaccttcgatgttttgtaaagctttgcgaagtttatcccaaagtaggatttcccggtgatggatgttcatgattccttgttcttgaatccattttaccccggcattcagtccggcaactcctagcaagttgagggttccgtattccaagcggtaagggtattcatccagatgcacgggataagcggagcgaaccccggtacccccggcacgggtgtgtttgatttcgattccttcacgtacgtacgaaccgccgattcccgtcggtcccatgagacatttatggcccgtgaaacaatacacgtcgataccggaggcttgcatgtcgagatcaacggccccggccccttgactaccgtcaaccacgaagataacgcctttctctttacagattttcccgatttcggtcaacggctgaatcgttcccagcacgttggaacaatgggttacgacaacaaatttcgtgttcggacggatggcgttctttatgtcgtcgggatgtacatagccgtgtgcatcaaaaggcacgtaagttaaatcgatggttccgttttggtggtgcatgttaagcgggcgcaacacggagttgtgttccaacatggtagataccacgtgaatgcctttctccaccaaaccgttaatgatcagattcaaggagtccgtggcgttataactgaacgttagcctgttatgatcattcccgccgttgaatagcttggttagcattttgcgggtcgagttcacgacttcctctgtctcgacggcagcatcaaacccggaacgcccgggatttacaccatgtttgcgataaaagtcgttcatgaaatcataaactacatccggcttcggaaagctggttgctgaattgtctaggtagattaatt

SEQ ID NO: 752 - DNA, 1387 bp, Butyricimonas faecihominis
acttacaggttcgtaagaaattccctcgtacttatttaccagttcaccagaatccgcatcatagatatacaaagaacctttatattcaccctcacgattcggattataggttgaaatgtagaattgtttttggcgggaataatcttgatattcagcatcactgacactacgagaacattgataatgattcaggcaacgaacctcttcaccctcgggtaatgttatgaaaggagttgcatctatatccaactgcgagtaaaaccatttatagactttattaccattagaaacaaaaacacaagagtagtaatcattgggtaataattgagatgattccgtaacgattccttctctaacagaacgttcaaagagaacccaaagtccaccgccaccggcaaaattatacatcatcccttttattccagtaatctttgtctgtccaccatcacgactaataacatatacatcatcatccaaattctggaataatttaatcacctttctatttttaaaataatcaaaacaattctgataagagaagaaaggatcgtacccgttagctccactccaacaaactgcatcccgatctttgctaatgaatacccttgtcatactacttgtgtaactcggacgatcgtaagcatccgtgtacacagtttcttgcggaagaccagggaaagggaatatcgcttgttgctgggtttgtaccatagccacacccccatttctagacacgacttcaaattctgtactaaattttccatcataagccattaatctacccgggacgaagttcaattcataaaacttaaaatcatactcgtaaatctctttaaatgtcttcgcatcaatctgaaccaacttctgactctctccatgcaagatatacaagtaattcccgactttatctacatctaccggatccatatataattccttaccttcattcgcataggcaaaagcattttgcatgaatgacggttgcatcccagcttccacttcttctggagttaacgttttcatgaaagaaatacttcccttaccatcaggacgacgtcccaaaatcataaaaccttcctcaaactgagaattaacaaaaacatgataatatttaattgtacttccatcctcacttgtcactatctgccgtaagtggtaatgccccaactctcgaacgacgtaactcaaatctttttcttgagaaatgtttttaaaaaccgttgtagattccccagtttttggatcttcagcataaagccccatatcccattgataggttaactcgtctgtctcactttcaatatcagctttaatttccagcgtgttattgaaataaatattgatcgaatcttttgctgtaggtaaaatatttacctctataataggt

SEQ ID NO: 753 - DNA, 1376 bp, Butyricimonas faecihominis
tcttattcctagacgtatcgcttgtcaacgtgcaaaattaattttttttttgataccaaaaggggctccacgaaattttatgcaaaaaattatctgtctggcggattatatccttcttttccttacttttggtcatctgtttcacgtctgcgttggaacttgttgcttgtaaccactaacagttgaagtgaatgattttaaagaacttgaatattgtcaactataagaatatcgccgaggcgagtgtcacgtgtagtccccggtttaattgttttatcgggaataacggtgtggggaagaccaatattctggatgccgtgtaccagttgtcgatgtgtaaaagctattttaacttgcccgatgcgcagaatatacgtcacggggaggcttttttcgtgattgaagggcaatatgattacggggaggaggagattgacgtgtactgcggggtgaaacgggggcagaagaagatttttaaaaagaataaaaaggcttatacccggctttctgatcatatcgggttgttaccattagttattatttcacccgcggacgtggtgttgattgatggtgccagtgaggagagaaggcgttttattgacggggtgatcagccagtgtgataaggagtacctgcaattgttgatccgctataaccgggtgttgatgcagcgaaacagttttttgaaggaatacgcaggtcgatccattgatgcggatatgttgtccgtgtgggacgaacaacttgcggacagcgggcgtgtcattcttgaacggcgtagggcttttgtgtccgagttggaggggatgtttcaggtgtattacgaccgggtttcgttgggaagggaaaaggttatgttggaatattcgacgactataaagaatgatgatttcccgacttcattgcgtggtagtttcgagcgggaccggatattgacttatacgacagtgggtgtgcatcgggatgatttaaacttgagcctagaagggtatcccgtgaaaaagttgggttcccaagggcagaagaagagtttcctgacagcgttgaagttggcacagtttgcttacttggtgaaacagaagggggtgaagccattgttactgttggatgatatttttgataagctggatgctgaccgggtaagccaaatcattcaaattgtttcaagcacggactttggtcaggtttttgttacagataccaatcgtgaacatattgacgaaattttgcaacaacatgtcatggaatacaagatatttcatgtcgaaggaggagaagtgatgaatttgtaatttattatgattccatgattaaagcgtgctagtaggtgagaaagaatcacttaatcgtaaatcataaatcactaaatttagtgg

SEQ ID NO: 754 - DNA, 1375 bp, Butyricimonas faecihominis
cgtcatgaacaagtttaaagatataaaaattgccgtggccggaaccggttacgttggcttaagtatagcgacattgttgtcccaacatcatcaagtgaaggcggtagacgtgatacctgaaaaggtggaaaaactaaacaacagaatctccccgattcaagatgattatatcgagaaatatttgtcagagaaacccttgaactttgtggcaaccctcgatggtaaggacgcttataaggatgcagatttcgtagtaatagctactccgaccaattatgatccggagaaaaactatttcgatacctctcgcgtagaagatgtgattgacttggtgttggaggtgaatcccgatgcggtgatggttatcaagagtactattcccgtgggttacactcgtaatctctatgtcaagtacgctcaaaagggggtaaaaaagtttaatttactcttttctccagaatttttgcgtgaaagtatggctttgtatgataatctttatccaagcagaatcattgtaggttatcccaaaattatagacaaacctgaatttgtcaaagagaacgaggcgataaaggccgtgactgatgtcgagatgctaagagaagcggcccaaacgtttgcagggcttttacaggaaggtgctattaaagagaatattgacacgctcttcatgggcatgaaagaggctgaggccgtgaaactcttcgccaatacctatcttgccttgcgagtgagttatttcaatgagcttgacacgtatgctgagatgaaggaacttgattctaaggctatcattgagggagtggggttagatccccgtatcggtacacattacaataatccctcctttggttacgggggatattgcttgccgaaggataccaagcaattgttagctaactaccaagatgtaccacagaacatgatgtctgctatcgtggagtcaaataaaactcgcaaagattatattgctgatgctgtattacgaaaggcaggttattacggtgaaaacggacaatgggattcgagtaaagagcatgcttgcattattggggtttatcgcttgacaatgaaagcgaactctgataattttcgtcaatccgctatccaaggcatcatgaagcgaataaaggcaaagggggcaaacgtaatcatttatgagccaactcttgcagatggcgaaactttctttggtagcaagattattaatgattttaccaaattcaaagcgatgagcaaagctatcattgctaaccgttttgatgacactcttagggatgttgaagataaagtttatactcgggatatattccattgtgattaaatataagaaagaaatagagaggaattatgattgcaagatattgtactttaa

SEQ ID NO: 755 - DNA, 1370 bp, Butyricimonas faecihominis
cacttacatcatgttccaaaatattacacatgagtattttattataaaaagaggcccaattcccatcattattctctctctgctgcatatccaattggttatttttagcccacgtgtaataactaaaatattctccccgaacatctcttctactcgtactgccgtctaacggatttacaacactctcgatgtcatctgtcataaaatcgagagccatcatctcgcttccagtcgttttctttattaattcacccaataccaattcatcaaaatgttttaattcacgaggtataatcttgtcattatccttatattccaaaaaatcactgcaccctattccaagtaaacataataatatatagagaattcttttcataattatctttttagaaggttacattcaaactaaaactaaaatttttctgaggaggaatactaccactacctaaagttacttgttccggatcacgccctttcaaccctttcgcctttataacaaacggatttgaaacggagaaactcaaagaagctccttttaaatagatatgcttcaatattgaattaggtacataataagctaacgaaattgaacgacaacgaacaaaatttcctgaaacaacccgtagatcactattattataaaattcaaaaatatcatcccctatagtagctgcacctccattatgatagtataaaccttgcggtgtatgacgttcatctgttaatctaggtatatctgtatgcttttcatccccaatttttcgccaacgatccacaaattcatcagacatattagcattaggagcaggcaaacgatctccatccacatataaatcattcaaacgcatttttgagccaaactgcatagaaaatgaagcattcaacgaaaaatcaaaaattctaaaactagtactcaaacctccggaaaacaaaggttccctcctaccactatagacaagcgcactcgccaaggcttcttcttgagatgagatgatgacatttccttcttcatccttggcatatatccccaaaaacgtgggttctcccttttcatttaatcccccaaaacgataagaataaaagctatttaacgacctaccatttctaaccaaagaaccattcaagtattgagatacgatatatttatccatctcccccgaattagttactttattgtaacttttactcgtattaaaactcaaattccaactaaacttttccaattgaatgggagtagccgaaatggacaaatcccaaccggaatttattaaattcccgtcattaatagttacagccgtacctccatttgttgattcgatagtggttgataccaactgatcctttccttttttattataatattcaaaagt

SEQ ID NO: 756 - DNA, 1366 bp, Butyricimonas faecihominis
cttatgtgttatgagatgggtacgattactaactaaagttccagtttgtttacctaatgatgccaaagaattgtttgaatattattgcaaacaaaaagaaatagaggtttctaaagtacgctggatgtgctattgttgtcataaaaaaacttccaatatagtagcagcccttgttgttgatgcttatggcgaacatagaaatctatatctaacttttatatcattggattgtttaaaggaatatataaaaaatccagaaaatcctattacatttcaaatattagaagaggacttattatttatttctaaatatgatccttcctccgactttgtaaacatctgcatcaaagaatcttaattctccactttggttataaccaacattccacggatcaatatctccaactgtcaatttaccattggtataagtacctttacctttatatccaagattatgcattagagagttgatctgtggaagaaattgtttttcccatgttaccattggagtgtcacctattggagttattttattttgagagtaaacaggatatattctattatctccttgtaaatatccctcaaagttgatcctttcttgtaaaggtaatctattacgtttcatccattgtttgtgaaattctttaatctctggtgctgatgtaaactttctctctgtataaacttttaacactttagaaggatctaatgtattctggaatactgtttgctgagagccattatctacaaaatttccaaatatgggactatctacagttagagtttcctttctagatttaggttctgttgcagtacctatttgcttatatggactaggagattttctttctcctttaggtattcctgctctttcagcttctgtaataggtttacttccaaatctctttttagttgcaatcttacttattcctttattaattgcactacctaacaatgctcccattgcctctcctgtacctgtatatatactctcttttaccaagttagtgccaagatcatatgctgtctttccattgaagtttgcataaggagctgtccaaaaattagcatatttagttttctctaagttattatatgcctcattttttattgcatttactttagcttgttcttccaacgcagcacttctactaggcataggagaaagaaaagtttgattatctatattttgagttggcagttttttctttaatataggaagagggacattactcattctggtattatccctctttacttgtttcggtattatcttcattcttgtttatattctttttccatataccagttactgaatctattcctaataaagatgtactacatataaatagtaagtctactatct

SEQ ID NO: 757 - DNA, 1364 bp, Butyricimonas faecihominis
gtatacaattattatatatacaaatgtacacaaaaactgcgacttatagattcaatcacaaaaaatatattcaaaatatacaagaaaagcccttgaaacaagagcaagtttcaagggcttttctaatgactaaattctttattccgcccaaagttgaatcaagttcaaaatcgtctgctgcgcacgtctcatcgtgtccagagaacagtactcgaacttaccgtggaagttcattcccccggtgaataaattcggacaaggcaatcccatgtatgaaagacgggcgccatcggtacctccacggatcggacggacaatcggggttaccccggcttgctccatagccttgaacgccttgtcgatcacttccggatgcggctcaaccatctcacgcatattataatattgatccttcaaagttaacgtcaacacaccttcgccatacttctgagtcaacaattctaccactttcatcatgaattgttttttagcctcaaacttctcccggatatgatcccgaatgatataactgatttccgcgttctccacggaaccgctcaatcctaccaaatgatagaaaccctcgtatccatcagtatgctccggacgctcccaggcaggtaacaggctattcacctcggcagctacctgcaaagcattaatcatcttatctttagcataacccggatgcacgttacgtccttgaatagccaccttggcactggcggcattgaagttttcatattccaattcgccctcgaacccaccatcaatggtgtaagcgaatttagcgccgaatttctccacgttgaaataatccactccccggcccacttcctcatccggagtgaaaccgatacggatcttcccatgcttgatttcgggatgtgccattagatactcggcagccgtcatgatctcggcaacccccgctttatcgtcagcacccaacaaagttgtcccgtcggttgtaatcaacgtatgtcctttaaacgcagacaattccgggaaatccttcaccgtcatcatcagatcttcgttcaaacgaatatcctttccatcataattctcgataatctgcggtttgatattcgccccgctcatatccggactcgtatccacgtgagagataaaaccaatcaccggacgatcctcataacccggagtagcgggaattgtacccatagcataactatgctcgtccatctccacttcggttaacccaagagatttcatttcctctaccaagtatttcagcaacactttctgcttttcggtagaagggaaagtctcgctcatttcgtcactttgcgtgtcgaaactcacgtatttcaaaaaacgatcttttaaatccaccattttta

SEQ ID NO: 758 - DNA, 1364 bp, Butyricimonas faecihominis
atattatatacttagtggttgtctcctgttgggaacgggatgcagtaactggttggatgtgaaaccgtcgacccgggtggaacaggaagaaatgttttctactgaagatggttttaaaaatacattgacaggggtttatatcaagctgaagagtaattctctttacgggaaaactttgaccatggagttgaccgaatatctggcacaacattggaaatcgaatgcttcggaattatccgggtatatcagtgcttacgattatgaaaatagtaacgtccaatccataattgatggggtgtatacagatttttataatgcaattgttaatgtcaataaccttttggattttgttgataatggtgtcttgtcggaagatatgtataaactgatcaagggagaggcattaggattaagagctttttgtcatttggatttgttgcggttgtatggtccgattccgggaaaacagacagataagaagatcttgtcttatgcgagagaggtatcccggcagaatatgcccgtgaatacatgggcagagtatatcgcttttttggaaaaagatttaaatgaggcagagaccttattagaagaggtagagaaaaaagggatagatgatgattattttacttatcgtcagaatcggatgaattactgggctgtcatggcagtgaaggcacgtttttatttgtggattcaaaacaaagagaaagcggcagaatatgcgaagaaagtgattgacggggtaggagagcagtttaagttaagtcagcctgagaattttacaaacaaggactatattgctagctctgaacacttgttttctgtgcatgtatacgatttggaagatattacagaaacatttatttatcgttccgggggtgttgaacagacaaaaagtttaattgcagaattatttgagggagatgttacggacgttcggggtgatgggaaattgtggcagcagttacagggagtaactaccggaaaccgttacgtcttgatgaaatacaaacagagtgaggctcaggttgctacacgggagcagatacctcttgtcagattatatgaaatgtatctgattgctattgaatgtagtgataattctgcggtttatcaaccattgattaatcagttattaacagcacgaagtatatctttggatatggataatgctggggtagatcaaaagaatcagtttgtttccatggagtatcacaaagagttctacggggaagggcaagcgttctatcaatataaacgtcggaatgatgaaatgatcatgtggtcaaacacgccgggaagtacaagcgtgtacgtgttgccagtgcctaagagtgaaattaaatatgaagaataattac

SEQ ID NO: 759 - DNA, 1350 bp, Butyricimonas faecihominis
ttcatggtaaaagttatttacagaaattttattctggccgggtcatgtgtttcatgaatctcgactctcgtcgatctcgattcacgctcgctacgttttgttcatttcaatatcttaaagaactcttcttttcatcttgtcgctcccgtcatcccctcatgccctcctcttgaaagcggctgcaaaggtaaggcttgtttttcattctccaaacttttcaagcttttttttcaaactttttttctcgcccctcgtttaacctctttccctcgtgccctctctctcgaaagcgggtgcaaagataaggtaatgattcccccttttccaaattttttcaccattatttttcatctttttttcaagcccccgaccaataccgtgactggcaaaacgttaggaagaaaaaattttaccgggaaaacgggaaagaccaccgggaaaagggaggggaaggcggcaagaccgggaaaagggaccacgttctcgcccggcaagcacctttcatggacacccgtgaacgtctttgaaacgtctttgattcgagagtgacacgcctttaactcctgtcttctacccgttcacaccctgtcatcaccccttgcacggggttaaaaggggaatgggctaccacgagaactcgacaactgctctccaagaactcgacaaccacacacgccagtgttcatgccatgtatatgctatgtatatgctatgttcatggtatagcccaacgacgaactagcgccgaggaaaacaccgacaggagatagtgaaattacaaatgctttaaagccaacttgataagattctcaactgtttcgaccttttccgaagccaaaatcttgtccaaagtcttcgtcacctgggctcgagcaaagcccaacatcaccaaagctgcttgtgcctcttcccgaaccgcactcgtagaaagactcaacccctctacaggaacaccctctttacctactttatccttcaattctataataacacgctgagcagtcttcactccaattcccttcacgctctttatagcatttacattctctgtaagtatcgctccagttatctcctccaccgacattgaactcaacatgacattcgcagtgttagcgccaatcccggaaacagaaatcaatgcccgaaacaaacttctctcctccttagaaaaaaaaccatacaacaaatgagcatcttcccgcacgatctggtgaatataaagcataacctgattctgggaagcgatcttagaataagtattaaccgaaatatgaatataatacccgaccccgccacaatcgacaacagcatttgccggagttgcctccactaattcaccttttatatatt

SEQ ID NO: 760 - DNA, 1343 bp, Butyricimonas faecihominis
aaacagacaaatatacttacttaatagcgattttaacgtattaattgaacaattttgtgtacattagttcgattttactaacataaagcaactacattatgggacaacaaaaaaacagaggaattatagggatactcaccggcggaggagacgttcccggcctaaatccagccatcagagcggtaactattcgagccctgcgcgaaggctataaagttattggaatcaaaagaggctggggtggcctgattgacatcgtacgagatccacaatatgacaactccggtaatttttttgaattaacagaggaaatcgtgaacaaggccggacgcaccggtggtactttcctgcacacatccagaactagggcttcccacgtacctaaggcaaatgtacccaagcatttacaggatagatactcgaacgacatcaacgatctgaccccggaagtattaaagaacctagagttcatgggtattgactacttgatcccgatcgggggtgacgacacgttgagttatgcggtacgcttgagcaaggaaagcgtgaaagtcgtggccatacccaaaaccatggacaacgacgttcccggaacagattactgtatcgggttcagcacctgcatcacccgtacgattgccctcacgcatgatctccggacatcagccggatctcacgaacgaatactggttctggaagtcttcggacgttatgcagggttcacggctatgctaccaaccttagccggagctgccaaccgttgtgtgattccggaatacgaatttaacatcgaacgtctgaccgaactactttgcgaggatcgtttcacgaatcccagcaaatactcggtggttctcgtatccgaaggagccactttttccggtggcaacatgattttccaaagtgaagaaacagacatgttcggacataaaaaactgggaggtatcggaaacatgatctctcaacaattaaaagaacttaccccacagtttaaccacggacaagtaatcaacaccatcacgcaaagactgggctatctggttcgctgtggagatccggatgcactggattccatcgtacctatggcatacgggaaccttgccctagatttaatcaacaaaggattacacggcaggttagttatcctaagaaacggacgctatgacaacgccccgatcgagattgtaaccagcagtaaaaagatcgtggatgttcccaaattctacaatacggagagattacgtccccaatacaacagtttcgaattcatgccacagatgatactttaaagataaagctcccggtttcccgggagcttttctttaagataaaagaattaatac

SEQ ID NO: 761 - DNA, 1341 bp, Butyricimonas faecihominis
gtttatcatatatcgtctatttctattgtttgattaataataattttccatttgttgtttcgtttgtttccacggatgggcagacaatgtgcaagaggtgtatagccgggctttttgtttagtagacataattgctgatacagcatctcggcctgttttgtctcttccagtatataatccaatatatatccgagtcgttgaatcgatgttaatgaggctgtctgaaataaagtatttgagtttttggagaagtcgatagtttctactaattcagaaagaactgtggcggcaacggacaatcctcctatctgatgctcgaattgtacgaggtcaacagctgtcaattcagctgatgaataatgaattatcccggtttcggaattcttgctgcaaagtaaattttcgggaatatcttttctataattccaaacgataaggttgtttttccgtgcagatgttgttaccacggggcgtaaagtcgtgacagagaagcgttgagggcgctggtgggctgcaccatgaatttccgctgcactgagtaaactgatataataaggtttagcgagatattccatcagttggtcgatataataagtggggggaacgataccacgaactgaatattgtatcggaatcacggtataaaagcttttgtaaactgattggataattttttgccttgacagacggtacaactcgttcatgatatgttgttcgggcatgtcactaaaattgacttttacatctcgatatgagaatgtgggcttaccaaggctttcttgttgttttatccaatttcttatagtcatatcaatataatttgttgtaaagataatcattttttgattagggttgcaataaattatggacaattacttcaccatatgtttccgcaaaataagaatagcctcccggcgtttgttgtagacggtttggagggcgaggcccagttgtgtggcgatttcttcgggtttccagccttcgaggtacatgcggataaccgtggcgtaatcgtcgggcaggaattttagtgattcgtacagggaatgaaataattccacttgctcgatgtcttccgaaaattcgttttcaattttactctccagttcgaaacgttgctggtatcccagatgcttgattttatttttgtaggcattcttcaacgcgataaagcaaaatgttttgatgtaagggatcgacgagaattggacggattcccggagccatatatcggtgaaaatatcttggataacgtcctctgccggaagattcaacgggttgaaaatgtgggttgcgtataggtataattctctatatatcattcgataaacgatactaaac

SEQ ID NO: 762 - DNA, 1340 bp, Butyricimonas faecihominis
tatttatagtaatagaaatagtgagaaagctattctacaacaagaaaaactgttaattcgtcaacaaaatattaaaaagttggatgattataataactgtctaaaaaataatttggctttacttaatatagtagatgttatgggaattactgttggtcttgaccatcagaatatatcattatctaaatcagaaatatgtcaaatgaaaggtcgaatctatgcaccagatttgcagtatagatatgtgtttgaagttgatgtacaacgccagaaaacaaatttagaaaagacttatgaagaatgctggattaaagcacgtattggactatcggatttattggatcaagaactctcttttatagaacgtgttaatcaaaacagatatgatattcaaataaaagagaataatatgcatcgaaaaaatatcttattggaattaagtaaacaagcggtagatatagaaaagagaaagttatttctgcaagagattaaggatgttaacatggaactggaacgattagataaaaaaattatttcatactatgatgatgttgataagatgaccacttcgattaaagatttttcgcttgaattaaatagtactataaaggtcttatttgatatttctttattgcttattaaagagaaagaggctcaatttaaattagaaaaataagggtttggtatatatgttttaagttttaggatcactagtgtcccattaaaattggtccgaattaaaatttaaatgaacttggcctatttggtccgaatcgttctttgtcattttgaaatttagttttatcaaagaggtctctcagatgagttttatctgtcaatgagatattcaatatttgtagtacttcgtatgtactttactagtctacatactaaataaggcacgctatatttatatttctgcaatcctatatgataagaaccggtaagtttgacttttgtacgatatcggaagtggtaaggtttatgaagaagttttcctaatgctggcgtttcctcctaatcaaatatgtctatacagatttttcggtagttgaggaaggcttgctgttaaacacataataaataaagcttgtaaatagagaaggctgaagaatgaagtcatagaatttagcgcatgatcttttctttttatcactgaacttatcgtttttcagtaatattttgtaattttgccacacaattgagaaacatataaaatatggtaactatatattgccttaaagtgtgaatccttgttaaacggtaggatatagaaaatataaaccttctataaatcgtataatcgtgtatagaggattttgctgtaagatagtatatag

SEQ ID NO: 763 - DNA, 1336 bp, Butyricimonas faecihominis
gtgatgagaatatcggattcgatgtacctgtcgaatttcggaaagaccttagcttccgaccagttccgggaggtgctgtcatgaattattatttacctcgtaatcctgaagtagctggaatacgagtacggtataatgatgttcgagggatggagatggttttatcggggacttatttgagcgactcactcttgttacttggttttaatgaaaaacgggagaatgtaccggcattggttactttttttaacgatagaggtgaagagtctagtccaatggagtttacgttcgacacggaggattcggccccagtatctttttttgataatttaaaggtgaattcattttggggtggtttttcgatgatgtattcctctccagaggtggtaagtggtttggtacatgtgttttatcttggaacgaatcccttaacccaacgacccgatacgattttggtgatgactagtcctattgtagagggaggtgatacgctcaattttgttttgaaacaaacttctgaaaataatacggttgtcgttcggacggaggattaccgggggtatcgtgtcaaacaacaaatttttgaaggactacccgctttgtatatggatactttaaaatatggcgatttcgatttcaaatttacaggaaaaataatagaacgagaagaatatgcactgggagagaagtatttgtttgatggggatcggaaaggagaggtattttatcgtaataagaatactaatgcaaaatataaatatgcaacttttgcggctggaccaggtgcatttggggaacgtttcattatagatttacgtaaggaaaaagttccggctgcggtacggctgtatgcttacttgaattattatactgtttggccaacaacatctggaagtgctcctgcattattgaaggaactttggaatggtgcttatcgtacaagacttccttgtaaagttgctctttacggcactaatgaaaatccggaaacggtaaatttgagttcttgtgtgcggctctttcggcttgactataatcctaactcttgggaatcttcttgggcaaaatttacggatgacatgaattatggttttgtggatgggggtaaaattatttcaactattgaggatattgctgctacagatccagtgtgtttggatatgcgttgcaattacacaggagatagttatcgatacttgatttttgtgatcgaggacacattcaattatcctcggtggggtgttttaagggaagaaaatcctttggaatacgtgacctttaatgaattggaagtaagtgtgaaggctgaatagtgtaaatgaacaatcattcaaat

SEQ ID NO: 764 - DNA, 1335 bp, Butyricimonas faecihominis
gttaacaacaatatgcaagagcaaataaacatgataaccacgctagcaccatgtgggatgaactgcgaattatgccactcgttccaaaacaagaaaaagaattgcccgggatgtagaagaagaagtaccaactgcgttatcacaagatgtgacaagagaaagttatattgttttgagtgttcccaatatccttgtcggcgcctccgtcaactagacgagcgctaccgtactcattacaacatgagcatgatcgagaatttagaatttatcaaagagtacggggaaaacgcttttttacagcaacaacaggagaaattccaatgtcccggttgtggaaagttacaaacggtacattacgagggttgcatatattgcaagcaacagaagagggagaaacttcaccctcttcaccccaagatataactattttgaataagttaacggcgtcgtaatccagttcagatgctgccacggacgtactttctgcataatatcaaaactagattgcaggaattgatggacggcatcaaacgggtcatcataagccagagcatcttctagtgtcagaaaaaactctttcttctcgggcttgaatattgccattgcgggacggatcaaatgatcattaccttttatatcacttatgaaaggataaggcaacccgtagaaagcaggacgaggataattcacgtctcccggccagaaaccgcactcgaaataacgttcatcaaaagcatgatctgaaatcggtttattcatgccaaacggagccgattcaccgctatacacgattcccgtgaggtccatcgtaccgaaatagtaagccggcccatccacttttccccggaaaccggaaaggaaaccccgtaatgcctcgtacgcaaaaagatgattttgatgccaaagtttcacggcctccttatcgtaatgatgatgtttggtgtccttgtcaaaatcaatcggatcgtagaactcctgagcacggacattgatcgctgtcggggaaccgatctcttccagtcccttcatgaactgtttgtagaattccatcacggaaagcccgtcctgtaaagtaaacgtaaccactttcccgttcccgttacggaaaacgaccagatgtttcatgaagtttgcctgaatctcgaaaggagaattatcaccgggtataatccccgtggataccccttccaccgtcaagtaaagacgcacgtgtgcccactcgggacgttgatgacaacgcatcaatttcacttttcccaacatctgaagatacatgtgcagcgtgtcggcagttccttgccaatccgtataatttaaaaatttcttgttcatctt

SEQ ID NO: 765 - DNA, 1325 bp, Butyricimonas faecihominis
cccataatgaatcaaacaaaggtataaaaaaaactttatttttactctatcctacgccacgtttccttgacttgaacgtttttctgggtcccgtcggcgagttttagctttacttcgcccgtgaggacaagaatccggttgtttgcatcatattggtaatgagcggaggattccacgatgtcttttattttcacggaaggggcgtgttccgatagaaattgtccatgggcaattttgtaggttccgttgaccccgttagaacaactgaacgtgaagtcgtcgaaatattctttttgtaagagttgtttggtttcaactccattttcccttattttttcccatttaccgacaaacgggttggcaataatagcccgaatgagttttccgggattgaaaatacagtcttcaacgtatcttttgaacttcttctctcccaaataatcccgaattttgatttctcgtagggtcgtgtttgccctgaaacgaggggtaatccgcacatattccgaagtgaaatcttccgttggcaggctatctatgagccggatttgttcgtcccattcttctttatagaattgcagtattttgtttttgtcggtgacaggaagggacatggtgggcatgacgatgcttaacatgatttccgaggattgttgctgttcccgggcggaagtgatgattcctttataaacggccttgtctgatccgtaacgttttttcaggtagaggcgatacatatcgaaagaggcttgaggaaccgagtcaaggccgttctttaatttttcttcttcggcattcaatactttcaaatatctgtcgaaagttcttctttcgacgctgggagaggtgctttttagggcaaaatagacgggaactgtgtatgaaacacgcacgggagaaccgttttgttttcccggttcccatttgggcatggaggcgataactgcttttgcctcgttgtccagttcgggagaaacaccccgaataattttgacattgctgacggctccatctttttcaatgacgaatctgacatacacttttccttcgagttttttctccttggcggtttccggatagcgtatgttgttgtatatccatgtatttagattgccagggaatacgggcatctcttggacgaggaaatggacttggttgtcttccgtggaatcttgtgtagcctgtttatgttgaatttggctagttgctgcgtgtgtactaaaaacaaaaagaacgctcaccaacccgatttgtaatttggcgaggaattttaatttagcatagaatggttttaatgtcatggtgtgtttcttagtgtgataaat

SEQ ID NO: 766 - DNA, 1323 bp, Butyricimonas faecihominis
gaacgggacgtttaataaaattatctaatttcataatcttaattcattcaaagtcatttgttcatgttcttccattatcgggcgattgcctgttggcgtttggctgccgattcagccggggtgattgctttgatggacataccgtctctcacggatgttcccactccttcaaccacgatgcggtccccgatgtttagcccggaggtgacaacatagtttttcccgtcgttaatgggtagtatggtgatctctcgggtttttacaacagaactgtctgttacaacgaaagcgaatttcttatcttggatttccgaagttgccttttggggaataatgattgcgttgtctgattcctccggcaacaggataactcctgatccaccgctacgcaagatcccgttcgggttagggaaggtggcacgcacgctggcagaacccgtcgtttgatcaattaccccgcttaacgtttctatcttgcctttttcggaatagattgagccgtcaaccaattgtaattccactgccggcatctggtttaatactccttgggtagccccgttgctttgacgggttagtttgagaaggtctttctcgttcatggagaaataaacgaacatcttggaattgtctgataccgtggttaacggtgttgccatactggggctaacgagactaccgacacgatagggtatctttccgataactccatccgcggggctggaaacttgcgtgtaggacaggtttttttcagcgttgattaactgggcttcagcttgggccaaattagctttctgttgtgctaatgtgttttctgccgtttgtaattcgtactggctgataatgtttttttgcgccagcatttttttattctcggcggtgagcgccgctgttgcaactcctgcttctgcaaccttaacagctgcacgggccacgttcacggcttcctcgtattgtacggggtcaataacaaacagcgtttgacctttctttactaccgaaccctcatccacgcataacttcgtgatgaatccactcacgttcggacgaatctcaacgtcctgacatcccttgattgttgccggataagaattattcaactttgatacgctgggctcaatcgtgatgactgcatattcaggaactcccgcttggtgtcctgcctgcttgttttcgcaggcaaaaagagcagttcctaacataataacaatcaatctttgagacaaaataatcattgactttttaattttcatatgctagattttaattaattgtattcgtgtataactttaaaaacgccttataaaaggcgacacagagtcgaat

SEQ ID NO: 767 - DNA, 1310 bp, Butyricimonas faecihominis
atataattttaatcttgtttcgcaaaaagaaaattcatagcttgttttacgggagttttgaaataaagttttacgaaagcgaatgaaattttgtctttgttaagtgtattgtggagaatgatgcggtaggagttcattttaatctaaaaaaatatgtgcgaatgtttgtatttatacgagaaagcgctatctttgcaccgtcaaaattaaatgacactcggttcggtagctcagctggatagagcaacggccttctaagccgtaggtcttgggttcgaatcccaaccggatcacaatttgatgtcataacccgctaaaacataaaaagttatagcgggtttatttttattgtggtccaatatttactcccaaatgcttgtatttttgtccagcataccttctacaactccgtcccctccgactctgacaccaagaatattggtatccgtttttaactcgacaatgattctggaaacacaggaaagattatgtccttgttcaaagatgtacctttgtggtcttattccaagatcgtgaaggtaacaggctaaggcgcaattggaggttcctgttgcggcctcttcgttgataccataaagtggggcgaagttcctgcaaatggctgtgggggtattgtctatatcagatcctgtgagggcgaaacagtgaataccgatacatttcatttctttgctcaaaatagatattgctttgaaatctggaaccatgatttccaatgcattcgatgttgaaatcggcataattatatctctcaatcccgtcgaaactatacgtgccggaaaacgttcatccaaggaaagaggatgaaagcacgaggttagtcgttcgttggggatgatctcaaaaaaggaggggctgttctgttccatgaagacaaggccatcaccatctatccatactttcaataggcctgcggcagtttcaatagtgtactctgatttttttagtctgccaagctcccgaagaacgataaaagaagcgatagtagcatgaccgcaaagaggaacttcgcctttaggggtaaaatactctaatttgaagtcagctttgccggaatcggacagaaataccgtttcagaatagccgagacgtgccgctaatgcgatttttacgttagagttgggaatgaactcatcgagtacgacaccggctttgtttcctccggaaccattcatgcagaaggcgcttactacatatactttcatcgtataaaaattacttggtatctgttgcgaagttaagaaacttttagtatcgatgcaattggaaaagtaatctcatacatatgt

SEQ ID NO: 768 - DNA, 1310 bp, Butyricimonas faecihominis
tgattatacaccaaatgatgattcaagtgttttagttgtaaaaataaggtatgaactttcatttggaacatcatattgcagaacttttgtacaagagtatacgaggtgagttatctgattttgagcgtcaagaactaaatcaatggcgagccgattctccaatgcatgaaactctttttatgcgtctacagaatgatgaatatatagatgaagagttgggtgtctttattaaaggtgaagagaaaaattctgttttatggggacgcattcgtgaaaacagcattcttcggaagaagaaaagatttataagatttttccattggggggcggcagctgttttgttattggtaatttgtgtttctttatttattaagaaaggtgaacaggaagttgttccgattgcgattcaaacaatattaccgggaagtcataaggcaacactacttatggaaaatgggaaggagatagaactttcagattctgttcgaatgtctattgagcagggaattattgtttcaaataatcaattgaagtatggtgattcgataaaggaattagcatcgggatattatcatgtattaaagattccgagagggggagaatattgtttgaaactttcagacggaactgtagtatatttgaattctgatagtgaacttcgttatccggtaagtttcagtgcaacttctcgagaagtagagttaaggggagaggctttttttgaagtgataacagatccgcaaagaccgtttgttgtgaatgcagaacaagtacgagtaagggtgctgggaacttcttttaatgtaagtacttatgacaaagattatatagaaacagttcttgtgaaagggcgtgttgggctccagatggcgggtgatactcaagagtgggaagttaagccgaatgaattggctcgttatgatcgaaaaaataaaacgatagaagtgagagaagtggatattttgccttacgtgacttggaaagagggacatttcttattcaaaaatcaaagtttggagaaaataatggatgtcatggctcgttggtatgatgtaagtgttgaatttcaagatgagtctataagaaatcttcattttactggagatatcaaacgacatgcgaatttttctattatattgaaagcgttaacttcgtctgtaaatgtaaattacaagctgaatggtcgagaattgatattatatatgaaataaataaacggaaggtgcgggaacaccttccgcttttacactcttcatatgcaacgggaattgccaatagaagagaatttataaattaaagtaattcaaagt

SEQ ID NO: 769 - DNA, 1308 bp, Butyricimonas faecihominis
atattcaatactcgaggatagtagatcagattataacatatcatcacggaataaatcaacacgttcacgagactaaaaatagcgacccgtcctagaaattttccaataatggtatcactattatcctgtgggcgagcctctaaagctgatatcgtggtaaatctcaaacgccttaaatcattagataccataaaaaagaccatcaacacttgaacgaaattgtaataataagcagtcatgaacgggattgaagaaggcaatgcctgaacaacccacggcaaataaaactctccgaattcaatcttatcactctctgaaaatgaaatgaaagtaaaggatatcgtagtcaataatgcaaaaaaaacaaacatattaaacaataggtttcgccgtgttaacttgatctcatacaaagcttcaaagatgacatgatgtagattcataaaaaacattattacattttgtacaattaaaataaactatacagcaactcgccttcacatatatttccccaactcataacataaacagctaaatactgaaaagaatgacaaggaacactggggaaaattttcgattaccttcgctctctcgtgaaaaaagagaagtatacaaagcaaacaacggctacatcatccacgaccgcttcttcaccatctggcttagacaacaaccctatcgatcaaaaaaacataaataccaccaccggataaagatgttgcaaccgctcccgcagatactttttagctcgttggcgttgcgtcttcacagttgactcggccacatccagttgctcgcaaatggtcttaatatccaacatctcgatataactcatcttgaaaatacgctgacattcagtaggtaattcatcaatagcggcaaagatttcctcgaaaacatccgtttccacctgaaaacaaaaaacatcttcctcgtcaggagatttcaatcccaatcgccgattcgccttcgcacggacttgcaatttttccagataattcaatgccgcattctggacacaattatacaagaatgattttaacgccgattgattctcgaatttccccttggattcccaaaaacgaagaaacacctcttgcacaatatcccttgccgcctcatcatctcgcacgaacttattggcgaaataacatagcgacgcataatatttatgaaatacactttcaaatatttccggttgtttcacgttcagtatatccactaatatcttattttagccgttaaaccatcgcgactcgccctacctctcgcatcaaaaatacatttttctaacgagaaacatataac

SEQ ID NO: 770 - DNA, 1299 bp, Butyricimonas faecihominis
gccatgtatatagcagaacagattttaagtaaataaagaagccatgaatctccaacaacataatatcagcgacaacaattttgaacaatgtatcaaatgtacgatctgtaccgtttattgtcctgtagcagcagtaaatcccaattatccgggtcccaaacaagcaggccccgatggagaacgcctacggttgaaaaaattcaacttctatgatgaatccttgaaatattgtattaactgtaaaagatgtgaagttgcttgtccttcgaacgtgaaaatcggagacattatccaagcagctcgaattaaatatagcaaaaaacaaccgaaactccgagactatattctagccaatacagatcttgtcggaacgttatccactccgtttgccccgatcgtgaatacaactttgggcctaaagccggtgaaggcaattttggatggggttatgaaaatcgaccatcgacgcacgttccccaaatacgctttcggcactttcgaaagttggtataaaaaagtcgcagagaaacaagccgcctatccaagccaagtaagctatttccatgggtgttacgtgaattacaacaatcctcagctgggaaaagatttaattaaggtcatgaatgcttttagcatcggggtgcaacttttagaaaaagaaaagtgctgtggggtcgccttgatttccaacggattgatcaaacaagcgcaaaaacaggctcgtacgaatataaattcgattcgaaagtccgtgttggagaaaaaaatgcccgtgatagcaacgtcttcaacctgcacgtttacgattcgagacgagtatcctcacttgttggatattgataacgctgatgttcgtgaagacgtggagttggctacccggtatatctatcgtttattaagccaaaagaaaacaaaattgaatttcaaaacagggcagaaaatcaaggtcgcctaccacacgccctgccacatggaaaaactgggatgggcttactattctatcgagttgttgaaattaatcccgaatatcgaattaaccatattagattcgcaatgttgcggtattgcgggaacctacggtttcaaaaaagagaattataaaacctctcaagacataggagaacctttattcaagcaaatagaagcgcttgacattgattacgtggttaccgattgcgaaacatgcaaatggcaaatcgaaatgtccacctctaaacgttgtgaacatcctatatcaatattagccaatgcattagagtgattttaattccatcactctaatgcattttttgattatat

SEQ ID NO: 771 - DNA, 1296 bp, Butyricimonas faecihominis
agatataatttatcaacaagaaaaatattagattatggatcaggcaatatcgccggagataaaaagacagcgtaaacggaaaatggtcgtaagggttactatgattgtggtaatatgtgtgggggtgttttcttttttggtgaatatgtttcaacctaagattcggggagcggaggtgaatttcggtgtggtggatgagggggcagtggaggtttccgtgtatgccacgggaaaggtggttccttttgcagaagaaatcatcacttctccggtgtcttcgaaggtgctggaagtgtataaaaagtcgggggatcgggtgcagaaagatgaaccgttgttacagttggatctggaaacaatacggacggagtacgaaacgaagaaggagtcgttggagatgcaattgaataaattggatttacagcgtaaaacgatagcgagtgatttggcggaaatgaaaatgcaggtggatattgatgagatgatgttgaaacgaactttggtttcgctgaataacgagcgctatctggatagtatcggggccagtacgagggaaaaggtgcgggaggcggaattgaattacacggtgaaacaaatgcaattggaacaattgaaacggaagtttgaaaataaaaagagtacttcacaatcggaaattcgctcgctggagttggattacaagattgccaagaggaacatggatttgttgttcaagacgcttggggaggctcaggtgatggcgcctcgtgtcgccacgttgacttggattaatgatcaggtaggggcttctgtttcgcagggaagtaatttggcgatattgtctgatttgtcgagttttaaggtagaaggcgagattgtcgatagttacgcggataagattaccgcggggaaccgggtgaacgtggtgatcgggaacgagaagctttccggtacagtggggaatgtcacaccctcggtgaataacggaattatcaagtttgttgtgttcttggatgatcagagtaatactcgtttgcgttccgggctgaaagtggatgtgcatgttactcatgccatgaaggatgaaacgttgcgtttgccgacgggtgcttattacatgggacggggagattatgatctgtgggttgtcaacggggatcgggtggaaaagaggaaggttatgctgggagagagtggtttcgaatacgtggaggtgttgcaggggctgacggtcggggagaaggttattatctcggatatgggaaaatacagggataaggaggtgctgtatgtgaggtaagttgccaagggtagctt

SEQ ID NO: 772 - DNA, 1296 bp, Butyricimonas faecihominis
gtattatatgtcgtaaagatagagttaatgcagctaacgaagctccattgtatttgagaataaataaagggcaacagaagaagttactttcactaaagttacagatccctattatgtattgggattttgaaaataatgtatttcttgataagtgtgtcaatagaaattattatgatttagtgattgaagagaagaaacaagaaatcaacaagaagataatggcggccaatttggaaggaagggtattatctcttgatgagtttggggagaagaaaccccaaaaggtggagaaggagaaaaaagagtatgtaaagcaacattttgacaggtatattgaagagctggaggcgacagatcatatcaagaatgcgaggtattacaggtgttgtcttaattgtcttatggcatttacaaaaggaacggatattgaacttaaaagtattgatacggtatttctaaatgactttgcaacatggatgaaggtaaagaagagattgcggatgaatacgatagggaataggttgagaggtttgaaagcagtcattaatagagccgttgttagtaaaactattccagcagacatgaatccttttaacgagtttaaagtatcaaagtacaaggaggaaacatctaaaagggcaattcttaaacaagacattgaaaggattataaacttggatttgaaaagtatttcagacgagaatacattccctctctatgactttgcaagagatatatttgtgtttagctatctaggatgtgggattaatattgtagatattgcatttctaaagtatgctaatgttatagataacgagaggttacagtttcggagaagtaagacaaagaaaatgatctcatttcgtttacaacctatggcgaaggatataatcaagaagtatagtaagaaaaagcacaagcaaacagattatgtctttccaatattcgatgataccaaacagaaaacgatgaaggagaaatactataagttagattaccaaacgaggtatgtaaacaagtatttgaagaagataggggaatatctggatatatcattgaaactgacctcgtatgttgcaaggcattcattcgccacggtgctaaaacgatcgggggtaaacacctctattatatcagaagctatggggcatagttctgaaagagtaacacaaatttatttggatagttttgagaatacgcaaatagatgaagctatgagtaatttactttagttgcatctaaaattgataaattaagtaaggtgagttttagccagaatggtatataataatgtat

SEQ ID NO: 773 - DNA, 1289 bp, Butyricimonas faecihominis
atgttatatctcaaggggcgtgtttggtggaaaattatcaacttccatatacaagtcagttttttcaaatttatcaccatgtataaaagagggtgataagcctaaacctatcacccctcacacctagctagcacaccatactaattactctttgtatgtgatcgtttttgtgtagccattttcaatatcctttattgtggtaacatagccttcattatcgaaggtatattcatattgatatagaagatcgtgccattcagatttagctgttgagattaatttcttacttctattaccgaagtatccacttctaaataaaatgtcattaaattctgcatcctctgtaaagttgatagaggtgatgtcaatattactcttattttcgtattcagtataagtgaatgacatatcattgcctattctcaaaagattttcgttactccacgtaagaatttcggaatccccttctttctcagttttcaccaaatacttgtcactatacgagaatttaacaggctttccattataatcatcagaacttgcgacgatcatatcattctctaaagtgtatacgattgtattgtacaattcatcatcttcatagtctttcatcgtgatcgttttatccccgtgtacgtattcaagtgtgtaactataagcctcatcgatattgtaatatttgtatttagtaattcttccctgagaatcatactcgaatgtttcttcaagctcttttattccttccgaacttgatgtaacaattttactaaccaactttactttgtctgttggtttgtcatcatccttttcatcgtcatcatcagaacacgccacgaacaccgtagcaagtaacatcatcaataaataaatctttttcattttagataataattaatctttacttccaactaccaaagaagtaattaatataaacaagaaagcgtggtagttgtcagcttatctagtaagaggtaacgaccaagtaacccaactgaaaataaacagcaaccccacgctaaaccatgtatatagtagatatatatacggcaagcatgagcgtttgtatctgcttatcctttcagttcaaaaattggtcgttttccttactaaggataaagctaaacgcttccattaattcaatatgtctgcccaccagttaaactggaagacaacacaaaagtaaacaaatttcagcatctaacaaacgcttttagggttgctgtgtggcaaatttagagtaatcaattgaattaaaagaattaatttctaatggttttactctataaacc

SEQ ID NO: 774 - DNA, 1284 bp, Butyricimonas faecihominis
atctatatctattctagtcaaacttacttctaaacttcccattgtttctgttgcatagctttggattgcaggtttaaccttatcaaacaaactcttaaattcatccttcatttccccttcttcctcaataaaaccattcattgtactataaagttgcatgatcttgtctgccttctttaatagcctactcctgtattcatccattttaagatttccaaacttgtatttgctggaatctttagtggaatagtaaatagtttcagttatcaccccttctttatgtctgcatctacctcttatctgggttaacctatcaagggataataaagtataaggaacatcagcatttacaactgaaactagctgaaatccctcatttatgtcaactccaacaaagtaaacacaagtcatgaaagtaatatccttttccaacttcttatctactagttccacataataatctttcactttacctttactctcttcactacataatacaccacatctactccttaattcttctggcaataagagtatgatttcatttatatctgttattgaattataggcaattactattttttctccatcaccatgtctttcttgaatataccctgccactatcaaattaggattattagtatgaattacttgatagggggtttgtctctcttctttatcattatacttggcaaccaacattggttcttcttgcacctgatcatgagtaaaatctttgattgttgcagaaactaaagccctattagatggaggaaatttaaaataataatcaataacatcttctaattttggcctgtatgtggcatcagattgaatcatgtccacttcatccactaaaagaaaataagattcaagagatttcttttttgttgcaattacttcatatactttatgcaaactatctgcaacaactaaaaatttcttgtacacatcctctccatctgatattttctgattaatctcatcaatataatcctcaatatcttttggggaagtactagaagtaatatcaccaataggactaccaacatattgtaataaaccatctggtcttgactttgattttgaatatgctagtgacttattagggcaaacaattatggaatttcttttagcctcaatttctagagttgtagctcctactcctgttctattcttgtttaagataccaaaaggaatactatccaacacatctcccagatacttcttcccctccatgttaaactctataactttaattttattttcatcatcttctaacct

SEQ ID NO: 775 - DNA, 1274 bp, Butyricimonas faecihominis
tatttgaaccatgaaaagtatatggaaaaaaattttgaactcgaccatcgtctaccttatcgatgccgtgattaatatcctgaagatcggaagggataaacactcgaatcaatcagacaacaataaataattaacccttaaaacttgaaaaaatgaaatttaaaccttcaattgcatttgatgaattctccggatcagccgggaacgtcacggcggccaagataaacggtcgttcatacattaagagaaagcccatccctaccaacccgaacacggagaaacagcaagaagttcggaatcgattcaaagagattgccaaggcttacaaggcattaacccaagaaaaaaagaatgcttgggaactgcactcgaaaaaatcattctcacgtgcaatcttcggggtgaaggccacgctgagcggtatcaacttattccagcaggttaaccagaacttagctctgattaatgctcctctcgttgacactcccgcaacgaatgccacggaatttccacaattatcattgattagtgttgatggttcatcaaccggggtaaataccgtgggtgagaatagcgtaacttccgctctgccaacgctcgtatttaacaagttcgagctccccgaaggaattgctatggttatccggatgtcaaaattcaacgacaaatacaccaagttcaaaagagcggacaccaagatgatctctattgcaccgaccatgctacaagttgagagtgacaatgccttgaataacttgaaaaaagatgtaacgatcatcccgctggggcaaccttgggtggatgcgtatcatcttagacctgacaatgacatgaattgcatgatttccgttgatctagttagtaaatctgacgggtctatgatcacggtacttgaatacgttggcaatgcctatgatactcaagttctcaaagtgatgattgatgataagaacgaattgcataagactaactagtcgttaaactcataattaaatagaccattcccaaccggaatggtctatttttttcctatctttgtataaatcaacttcaaatgagcaacgaccactacccagttaattggatcataggcatcttgaaaattcctttcctacctatcctagccattatagaatacacccgaaaaaaaagagcgctaaaggctctgcgggagccttacaaacatttatatcttcctaaaggtgaatttgaacaccgtttcccacaatacaagagagcaaaaaaaagatattcccaaaagactacaatatagc

SEQ ID NO: 776 - DNA, 1273 bp, Butyricimonas faecihominis
catttataatagcaatcacttatctccccggctcccacaccgggattattcacacacaataattctaaagagaagactgactagactcacgcacagctttcgtcagccttcccttttatagcctaaaacaaagtctcggcttataaagtaaaagttacatcaatgataaagattccctatcttttggagatcaatacccatcttttttaactccttcaataagatctcatacttctttttgaccaatccattcacatctttcagcgggtcaagaacacccgtacaatcatacctattatatcttccatcattcggaacagcattcaattcatctgaagaataatcgatcaccatagcgatatagcctttcagatcattattctttgctgtctctacagggaaattccaaccgatattatacttatcatacccaactacacccagactataaaatttattactggctccccatgccacggcttcctcataatccgtcacatgaaaaaactcactgcttttcacgactgcaacaattttatcgtataacttttcaattaaaaaccatttgtgtaaatcttccttacccactcttttctcctccatagtcatattgtcaatagaagaatcaccatgacttagtgcaaaaatattagaaacactataaaaggaaagcttctcagaagctcctctactatacttataaagacttttgcccaacatcaatttcaacggcaaattagctcgtaaaacagaatcttgatacaaattcaaaaacatttcctcaagccaagccacctgtttccccacgtaagcctcgtcaggcatatccattttaaaagatgactctctgcctttattttcctcgtactcttcatcgatcaccacgtaatctccttcaattttcgccatgtaacggaatccggcatccgtctcatgttctcctaataagtaatttccagaaacagtttccgtgtaaatgaaaacattgtctccatctacaaaagcctcttcgtcaatcttgtacttctccgttcgggaaagcgtatccgttgtcatttccatccatgactgtcccatgttaaaataaagctcccggggagtatatttataaagaatataaaaaccacatcgagtataccaatctccgattcttgcatcataatcatgatctccttgaggaaattgtatcacgggttccgactctaaagtcggcgtgagggcatcctcatcgttgcatcctacccatgctaatgcgatcagcaatatataaaac

SEQ ID NO: 777 - DNA, 1271 bp, Butyricimonas faecihominis
attgaaaattgaaaattgaaaatgtaccactaagtacaatttcatacttcaatttacagattatacattgattcgtaatacttcatgtattccccactcgtcacgttatccaaccaatcctgattctccaaataccattttaccgttttttcaatcccctcctcgaactgcaaagaaggctcccaacccaactcttcatgcaatttagtggaatcaatagcataacgcaaatcgtgcccggcccggtctgttacatacgtgatcagtttctcggaggtcccttccggacggcctaataaacggtcagtaaccttgatcatgaccttgatcagatcaatattcttccattcgttaaacccacctatattgtaagtgtcccccactttacctttatggaatatcaaatcaattgcccgtgcatgatcctccacgaacaaccaatccctcacgttctctcctgttccatacacaggaagtggtttattatgacgaatattgtttataaacaacgggattaacttctccgggaactggtaagttccgtaattgttagaacaattagaaattttcacgggtaaaccgtaagtgtcatgataagctctcacgaaatgatctgaagaggctttcgatgccgaatagggagaatgaggatcgtattttgtagtctccacaaagaaacctccattcggttgcaaagaaccatacacttcatccgttgaaacatgataaaacagttttccgtcaaaatcaccctcccaagccaatttagctgcttgcaacaagcttaacgttcccattacgtttgtctgggcaaaagaaaacggatctttgatagatcgatccacgtgactctctgcagccaaatggattaccccatctatttcatattcggcaaaaacctcacgcattttctcgaagtcacaaatatccgctttcacgaacttgtaattcgacatattctcaatatctttcaaattcgctaaattacccgcgtaagtcaacttatctaaattgacaatacgatattccggatacttgtttaccattagccgaaccagatgcgaaccgataaatccggccccgccagtgattaataaatttttcattcttcaaaatttagtttcaagtttgcaggttacaagttgcaggttgtgttatccagataagtaattaatttactgatacctttggatagaaccatacaatcggacaataacccgtttacctttatttcatctatattttagttacaagtttacaggttacaagtt

SEQ ID NO: 778 - DNA, 1270 bp, Butyricimonas faecihominis
gaatttatacaataataaagaaccatattttttataaaatgctacaatatcatcatcatagtcatgatcaccttgaggtaaagtatattttccataaattaactcaggctcctctgatggtttgatcttaccttcatcataacaactgataaataagacacaccctaaaaataaacataatatctttttcatactcttcattcatttaattcgttaccaataaatacgatcatggattttgtactaaagccggatttttatccaataccttcttgggaattggtaacacgtaacgatcacttccttttgccaagcgatactcttgtacttgtcctttattaatagttacctcatgaatcatttctggcattccacaacgccgcaaatcaaaccaacgatgatcatcaaaagccaactccttacgacgttcatccaaacaaaattccaataatgtttgaccatctgttatattaacatcttcataaggctgacggaaacgatgttctcgtaagtaattcaaatcagtcaatgcacttatacgcaaattttcatttccattttccaaaaataatcgaatatttgcctctgccctgttcaggtaagcctcagcaaccctcattcctctatgaggattcgacaaatcatttaaatttgacttagacccatatatcgaaccaaataccatcgggacaattgacttaaaataccgttggtaatagcaagctggtcttaaatcatttacatcatgttgtgccaaaaatttatcagacactgaaaatattggtgaagaaccaggatatgtaaaaatatcaggtaattggaaaagaatttcactaatccttttatctccatatccccatataagttcaggactgttataatttaacacaccaccatttacatcataagtaagtgtttcatcaccaaaccactcatcaacctctattgttacaaaatcagacaagcgacgcaattgaggatttcttgtaatcacaacagaagcatattctgcagcctttccccaattttccacataaagatacatacgtgacagcaaattataaacgaataaaggggtaactttgtattgtatattattctgcccatatttatccatcaaatccacagcttctaacaagtcacgttcaatttgttgatatacttttgcaatactttctcttgctgggaattcatcttttactgcagaactcacaatcaaaggaactcccaatgctgtatttagatcaaccccttctttattatatggctg

SEQ ID NO: 779 - DNA, 1268 bp, Butyricimonas faecihominis
aaactaataagcaaaagtaattacttgattattagtatgcattatcttttgctcactactattttatttataattcactagggctgttcggtcacaacaattaatattcacgttctaaccatcttgaaaaaaatacatcatagacttggtacgtcaccccagttttatccacggtttcgagaactaactctttttcgatcattgcttttgccaatcgtcttgcattggcgggtgaaccgattccatatttactgataaaatgttgtgctgagatttgtttgacttcgtgttctttggcaatggcaattaaaaaattccactgaattggagtcaatagttgacgatattgcaagaaaacaggttcattacgttccaatagatcagagcaagcccattttacttgttctgttgtcacgtgggatgtacccatggcaaaaattcggttacataaactttgcgtgtaaaatgtatgccttctgctccagttgagaatttctgcaacacaattcgggtctatttgttttccgtaacgttcaaataaatcagtaatgaacgtagcatacacgtcctgctggattttttctatagcgaggtattgtgtactggcaaagaaaggtcggttggcattcgagaatatttccaacatcattgcccgctggcttccgctaaaaatgaatcgtatatttttaagttgttgtatatatgttcgcaataaagcttccatgttttgttcggggtattccgttatctgttggaactcgtcaattgccaacacgatattcacattttggctgtctaagaaatcaagaacaccttttaacgtgttctctttttcctgtgccatttgatacacgatttgtacttgtggttcccctgtcaatgcgtcgtagccgatcagtgggcgtaatcctttcaaaaaagtcatgaaacgttttccgatgtttgttttctccggaaattttagcaatatggcttctgccaataagcggacaagatcttctaggttgcgggatgcataaatatccacgtacacgcattctccccatgctttctccttcaaataatcgaaaaaacgtagaatcaagccggttttacctattcttcgaggggatataagtgttgtatcaactccattacatacgtttttgtataaaatgtcaagttcttgttcccggtcgcaaaacagctctttgcctgcatatccttttattaaaaagggatttataattttttccatgacttctattatttcctacaaagatacgaat

SEQ ID NO: 780 - DNA, 1266 bp, Butyricimonas faecihominis
gtgatatatatatagaaaataaatattaggatgaaagaaaatgatatagatcgaattttagcaggaagttttaccggagaaaaactttccgaggaggagaaatgtctgttggaagaatggagacgggagaatgaatgtaggaatcggtttgagggagaattgcatgaattgcggaaacttggtgtgggattgaaatatcgagaaaacaaggattttgtttttgcgcgaattgaaagaattgtacaaaagcaacggaaagaacaattatttattcgttggagttctgttgctgcgggaatcatgcttttgctaggtattatgggatatttcatatattctcaagaagacggaaatgaaataatagagattgcaaatataggtccaggatctcctaaggccgaacttatattacctcaaggacaagttattgagttggactcttcttttcaagagattgtttttgccgaacatcaatcgaaagtggcaagcgtaaaaaatacattaatttatgatgcagggatgaatgtggagactattgattttcatacgattcgtgttccattaggaggggagtttaatctccagctatcagataatacgcgagtgcatttgaattctggttcatcattgcgctatccggttaggtttgcaggagatattagagaagtctttttgactggggagggattttttgaagtaacaaaagacgaggagcgacctttcgtggtgaaaacagaggaggtagacgtgagagtgttagggacctcttttaatgtaaatgcttatccggatgagaaagtggttgcaactacattggtcgaggggaaagtaagagttggatacggatcgaaaaattttgatttagatccgggaatgcaatttgtgtatgatcgagaggataagactgcaaatgtacgtactgttgatatggagctttatacttcttggaaagatggttattattattttaaacaggagtctttggagagaataatggatgtgttagctaaatggtataatttgaatgtctttttccaaaatccggaattgaaaaatatggaatttggtggacgtttgaaacgctatgaggatatcagttatttgttggaaaagatggaggaaactcaagatgttcagtttataattcatggtaacacaattattataaaaagaaaaacagattgaaaatctggtaaatcttcaatctgctgaattgaaatatacttttcttgtcatttgcactggaagaaaaagtatatcatgtat

SEQ ID NO: 781 - DNA, 1260 bp, Butyricimonas faecihominis
atgctctatattgttgattatttaatcctgaaatcacattgaagtccgattgaaaccaagaaataacctgacgagatatttcaccgcctaactgttggcataatgacaggaacaaacggttgtcgttggtcttttcttcatatccgactccttccgggaaattattctcatctacacaaatcccctcttcgtttctgacgaacatcatctgctctttagaacgaggtgttgttttccggaacaaccattcttcaacgatacgttccaaattatacctgaatccatatctgtagcaatattcacctttcagaaatataatctcaaacatagtgggatggtgattgtcctttaaaagaagaaatgggtcatattccaattcgtcattgtcattcaacttcaccgacaacaacacgcatctcgccattgcgtgcatcgcactgacaagattggattttccacttgaattggcaccatacagtgcaagtgaacgaagcagagtgtgtttattgtaatcaaacaagttcgtttcagtacattctttcaaagctttatcggcttccaataccaaggtcttttttccataaaacgacctgtaattctccactgtaaattcaagtaacatatatctgacttttaagtatttctattattacacataatctatttcgattgcaaagatacacaataaaatttatatcgcgtgttattttgagagattttctcaaatataatcacaatacgtcactctcaacatattctattcaggtcaaacattacaaaaccattattggcttctaacaaataaaaaacattcaacagcctattacataactgtttgcattatactttgcttcgttttaatattacattaaaatagagcaaacagcattaaatggagaatcttaattaaagaattacaatttggctgaccaaaagaaaaataaggagtttatctgctgttgtcgatattttgagggttctggcagtttagtttagaacttgaagagatatacaaaaaacagactaaacttttttatatttgcaatgtactttgaatatcatcgtatgatgagaacagtttcttttttgggggacaaaaaaatagcatgaaaaaacatcgagggacagaccttatatttgctctttttatcttttggacagcaattttttgtccccagtttgtcccccgaagtatttcataaaaacataatatattaaatatcaatttattataattcaaaaatgatacaaaacattttc

SEQ ID NO: 782 - DNA, 1259 bp, Butyricimonas faecihominis
atgtagtttttagtaatcatcatatttttatctttaattttttccttgttaataaagcgagtacccgcattccgtgtcatcatacaaatgttccatgaccatcatcaacgtacccaatatcgccgaataaacgcccagattactcatcttcaactcgcaatgtcctcgcatacgagccaaagcgtacttatttattgcctgttgaaccgggaccagcatcaaatcgcccgcttgcacgatctccccaccgatgactaccatgtccgggttaaacaaatgtaccatcgtggctattccctctcccagcttctctcccgcacgatgcaagaggtcgatagccgaaatatcatctttccgagccgcctcgataatatcctgtaacggcttgcctgccaccttctcgatagcccgtcccgaagacacggtttccaagcaaccgatctttccgcaatgacatggagcctccagccctgaaatacggatatgcccgaactctcccgccataccaattcccccgcgatataatttcgaattcaggatcatccccaaaccaatacactcgttcacgctaatacacaaaacgttattcacgtctttggctaccccaaacgtgtgttccgccatggccatcacgttagaatcgttatcaataaataccgggatttgcagcatttcctccaaaatactctttatacccggttgttcatacgtcaaataagtatacgaagttccctcccgatcgatcaatcccggaagagcgaaacccgccatcttgatctttgcccgatctatattcaaatgcccgatcgtctcgtcaatcttctcccgcacgtaacggagagtcgcctcatcatcctgctcttccaaaatcgagggatattccagaataccctcaatcggctcattcttcaaattgaagatagccacccgcaggtactccctaccaatatccactcctaatatatacgcggcatccggatttaatgaaaacacgtgaggacgtttacccccgatcgaatttccgcatccccggtcaatcacccatccctcttcgatcaactcttcaatcatgcgactaaccgtcggcgtggtcacgtttgtcaggcgacaaatctcaggcttggacaactctcccatccggtaaagaaacccgataattgctttcttctgcaagtaccgtttctccttcaatcccggtagtgaacctttatttatggtattcgagtcattcatagctctccgtttttcaaaaagaatcg

SEQ ID NO: 783 - DNA, 1254 bp, Butyricimonas faecihominis
gcgttacttgatttaagtaataacattaaacgtacagctcttgttatagggcatctctgaaacttttacaactttagaggaaacccgccacgagaatggcgggttttttaatagtaaaattgctacgatttgttttgtggataatagtaattttactatcgaaaatattccagtagaggcttatgattatgtagtaaatggtaaaagtgctatcgagtggattatggaacgttatgccatcactactcataaggatagcagcattactaatgatcctaactgttgggctgtaaagcataataatcctcgctatatactagatttttgctaagtgtgatttacttaagtatggaaaccgtagagattgtgaataaattaccgaaactaatcttttaattgtcagaatgaagagtttacaatgataaattatgacaaaataagggaatgtagggttaaaatggcaatgaatgccgatggtggatttcgattgtctgtttttgctataaatgaattattaggaaagcaacaatatattacagaagaagctatacgtgaaggttttgatttcgcaaaagcgaaacaggaaaaggaaatagaggaaagtgactttactacgaatgaagagaaagaagttgaaaagaaacagagagagttatttcttaaacttttggaagagcaagttaagctatatcttaaaagtcagcacagattactgtgacgtactagataaagaaaagaattatataaatctaagtttgtttttttattagtcttaaaatcagaaaatgtattgaaaaacaaaaaagtatttatatatttgcagatatgatactaaataggtaggagagcctatcttgaaaatattgtgagtttattctaatcttaaaacagaaaatcgccaatttgaagaaacaagattagacatgagattcacgctggttaagcgtgggttgttgtctgtctgtttctaggcgtttggcgatgcctctgttttagatagaatttacaatcctcgcttttttatttgtgctaattgagaaattattttatgatatacaataacgacctaaatgaagatatgaaacaaaaaaatgaatttattcaacgtcaactaactcttttaatttgactttaagtcctcggcttattttatagagagtacgtattgttggattagtattaccagattcaagtctagcaatattagcattatccatattggaagctgctgcaagttcatccaatgtcataggt

SEQ ID NO: 784 - DNA, 1250 bp, Butyricimonas faecihominis
gtcttaacatacttcactggaataccttctgtaatccattgcatcactattggaagcagagcatcaacatcaatattatactctttcaatttcgcaagaagagttactatatcttcagaattactaatatctacgtcttcattatctccattcacttgttgcgcaatcgcattaatgctaggaacgatataaatcatactgttcttagcataccaaaatgccaaatttttaggagaatcgctccaatcatcatgcgaagcaataagttgacctttatcttgattagcaaacatattttccatggaaaaattttcccaatattttgcagtaatattaccatcttcatggaaagtaacttgattcaacacattaaataaaatcatcgaaccaaacagatttactaatgctgccgcattctcgaaattaggtttttccaaatcaatagcagaccatacaaaaaacaatggagtactctcaccactacttgtagctgacaaattccaagaacccgttaatcccgcttgagcggtctcggacaattttgttgttgcggttgcagaaactttaccctctacactgattttaccttctacttttacatttaaaataacaggttttgcatcagaccgaacaataagcattgctggtggtgtagtcaaaccttcctctccggaaaaaacaaaagaatcatcagcctgttcttccaattttacattaacagggattgttgcatagcccggtatcacattttttaaagtcaacacggcttctgatccgttttttaccgccatctgcaatgtacctgtagtcgcctgttcgccattaacttcaaatgtaactttttggatttctatttcatcctgaggaatattcttccatgctttatcatcgtcatcactacaactcacaaaaaatgttacacctaaaatcaacaataataaaaatttgtttttcatacttcattaaacattaattaaacattgacttatccgtcctctctttaaatattcatgcaaacaataaatcttcatttattgcaccatgcagccttattattagcaaaaaacgtgcaaatttaatcaaatgttacaaggagtattcaattttaacactttaacagtcatatattcctaattacgtgatcattacaaatcacactttatactatttagagatactttcatttctaattaaatattccaactacgtgtctattcaaaagtaataaattaattggttagcatcttgtg

SEQ ID NO: 785 - DNA, 1235 bp, Butyricimonas faecihominis
aatcttttattatcaggtcatttacccgatcgatcacagatgcatctatcgaagcaagatagatctgcgtggtggcgatagaatcatgaccaagtgcatctgaaatgacattgataggcacatttttcgatttggctattgtcgcccaagtgtgacgagtgacatatgttgtaagcgtaaccggcagtttcaccatgtcggcgatgattttcaagttgttgttaatacggcgtaaggctgtttcgtattgtttgcgttcatcgctgaccgaacagtctataataggaagcaaataaggagaatcattattcgaataacggtcaatcagttccttgataggttttatgattttgatgtgaagcacttgatttgtcttatgcctccgataggtcagcactccattttgaatgtccgtcttcttcaggaatactgcatctataaaagacatacccctgcaaaagaataaaaacaggaataagtcacgggcaaattcgatgttgggtttaagggacagatcaagattcttgatctgtttgatgtcgttgattgaaattgcccgtttgagagttttctctgttccggtgaataccgtacgaaaaggcttgcaatccctggtcaattcctgttcaaccgcacggttatagacagcccgaagaatacgcatataaaaggatatggaatttgatgacagaccggtcgatttcagatatgcctgataatcttccatcgtaatctgatctattgcatccaatgtaatgtcttcgttatcccgaaaccttttgaaactgccgagtgcagcgtggtagttctttgccgtgccgacatgcttcaattggcgtaaccgtccgataacatcctccatgaatctgaaaagggtattctcgtttgcagtgttcctgaactccgtaattatatcttcggacgaatacccatgccgcctacgatcgaaattttctataattccgtttagcctatccatatcccgatggattctttgcgcaattgcccggacaaattctgcacgtccgttgtcgggcgtaattacaagtttcgacattttttcatcccactcatcggggaacaccttgtattccgttgtgatttgcctgacgatacggcggtgagttataaaatagacgatggaacccggacggtctgcgaccgttgacgggcggaattttacttttactgttgccataactgtatttttaatattttatttatgtctataaaat

SEQ ID NO: 786 - DNA, 1235 bp, Butyricimonas faecihominis
atctaaaatttacaattagttggtttttcttattctgttgatgaatgcgatcaggtaacccaaagcgataaacgctcccggagccagaacgaaaacgagcattccgtaattttcattgtaaagggtcatgttgaaaaatttcccactacctagaatttcacggatagaacctaatatcgttaatgccatcgcgaaaccgaggccgatacctaaaccgtccagcatggaaggaatggccttgtttttggatgcgaatgattcagctcgtcccagcacgatacagttcaccacgatcaacggaatgaataatcccaaagattcgtgcaagctcggcaggtaagctgccatgcacatatcgaccacggtaacgaatgcggcgatgatcacgataaaaccgggaatccggattttgtcgggaatcaggtttgccacgagcgagatggccagattggatagtaccagaacgaaagccgtggctaatcccattcccaagccgttaatggcagaggtggtaactcctagcgtgggacacatcccgagaaggagtacgaaggtcggattttccttgaagaaccctttggtaaaagtttgccagttgttcatatctttattctttcattgattttacgtgttattttgcggattctgccaatgcttttgccgcccggtttactgcatctaggaaggctctggatgaaattgttgcagccgtgattgcatccacgtctcctccgtcctttgaaacctgaagtccttgtgaacccggagtctttccggtaatatcacctttggctcctttcacgaaccatgcatccatcttggatcccagacccggggtttctttatggcttagtacggaatagttgtatacatttccgtctggagtgaatccgaccatcagttcaacaagaccactgaaaccgttattcgtgaacgttttaatggctgttcccacgagttgcccgtttgctttggccggatagaattctaattttcctccatctacttccacgatttgtttttccgtcatcgggtcattatcgaaagcgggaaccacggcacgaatggcctgtacttgtttttcaatttttactttttcaattaacccggacgtgagtgagttcacaactcccacggcggctgaggaaaccagtgttaccaagaataacaccagtaccatattcttaaagcttgattctaatttctttcccatcagtttagattttaaattttag

SEQ ID NO: 787 - DNA, 1225 bp, Butyricimonas faecihominis
ggagatcggggtgcgcgtggaggtggggggaaagagtttcatttacacgcccgcggcggggaagatgccggaggcgggaaaggtgaacagctacacggtgaagttgaaagaggtggtgctggccgggaataaagatatgagcatttccggtagcggggaggtgatcctcgtgggaaacggggtgacgagtggcaggatcacgtttgacggggatatgacggtggcattggtgaacgtgaatatagaggcatataatggtaccccgataacggttggcgggggaaaggtgactttcgagcttttcggggagaatcggttggtggccaagacaacgggatatagcgcgttgtataacgcggaggggacgacggtgactttgcgcggggcggggacgttggtggcgaagggaggagaattcggggcgggaatcggtagcgggtatcagggaacttgcggggatatcacgatctccgggggcgttgtggtggcggaaggcgggaatggtagtgcaggtatcggtagcgggtattattatagtcgttgtggagagattctgatctccggggggaaggtgacggcgacagggggtatggaggcggcgggaattggttgtggtgctttctcctcaacttgcgggaatatcacgatttccgggggagaggtgaaggccgggacggtggacggggggaaagaggccgcggctatcgggaatggttatggggcagaggctccgttggtcacgctttcgaattgcgtgattcgcgttccgggggataacggggcggtgacgggctttaacgggatcaaggccaagaaggtggagccggatgtcacgaatgccggggagttggagaagaagggggtgacgttggtaattggaaagctagaagaaatttagaatttagagtttagaatttcactttgagagcaagatggtattttagctcctcctctgttctccctccccatccccccttcggggtgggggttgtcccaaaagtcattttatttccaaaaactcctccgtcacttcgtgccacctcctctataaacagaggaggagctggtgactcttcccgaagacagggagtatttcaactctccctctgtttatagagggaaatcggcgagtaagcgaggacagacagagagtttactcgttgtctgtcgagcgagagccgattcgagaccggcttccgggctcaataccccgaaggggggaggg

SEQ ID NO: 788 - DNA, 1224 bp, Butyricimonas faecihominis
gtggggtgtcttgtcacaaatttagagtaatcaattgaattaaaagaattaatttctaatggttttactctataaaccatttataggtgttatcaccatgtaacgctctatctattccctccgttaattgcgtggagtttaacgatctatctaggaagttatctatgtaactacttttattggcaccagtaagcatgttatagaatttccacaagttgatctcgttctctccatgctcccttttaaagttatcatcatggtaatacgccttggcaataatatttacctgtgaatccgttaattccatgttagggagtaacttcttctcttttgctggtaagcactgatacaacctgcttttccccaagaattgagcgaattgatgttccgtgaggtaagaactagtgaagctcttcatcaaccgtaaatgcttttcagcatcgtactgttgaaataacttcataacctctctaaacaggtcatgctggctcgtggctctaaggtctgttttaaaaccgtcagtaaatgtacacaagttgcaacatactttattctggaagccaatagcgacactaaacctttctgccactttctttgaataaaggttctccctgttataagctctcactcctgtaatacataaattcaccctgttaccgtctatcgtttcataaatggtaggtatttcaaaagcaaacgccattctctcgtagtagatcgtcttgtcactttctagtaattgagctactggtttatgtatcgcttctggtatccttccctttataacgtgacttaccattatatctggttcatctatgctttcccctctaaacagttcactcgccaccttgtgtaccgtttctataaacgagggatgagatattgtcatctcgttatccttgctgaacactggcacgatgcaatcactttttaaacggatcatgtcaatgggttcagtgttagcttcaataaaatgttttctccttttgtcctttctaacaggttcattcactacttcataaggtgtaggttcttcttgcttgatattattactgccaagtaaaactggcaataacccttcattttgacttggaattaatgttgacgtgttcataatctaatctatttaacggtggtggaaatatttgaaatttcagtttatatatacaatccataaatttcccaccaaccttggtttctaaaattcattatcacttttacttg

SEQ ID NO: 789 - DNA, 1211 bp, Butyricimonas faecihominis
tattacttcccttgttttgtatttcttgttatgacgacaaggggaattatgactatcatgctttaaatcaagctgaagtagcgggtattgatagtatgtacacggctatttttatggaaaagttggttattactccgacgattcaatctgaggataaagaacgggtatacgattatatatggatgtgttatgataagaatgatttcaggaaaagtatagatactttgtctttagagaaagatttggattatacggtttcgttgtcattgtcttcctatcagttgatttttgcgtaccgtgaccgggaaactgaaataacgaagtatgtatattctagtttgagcgtggaatcgcaaaattccagaggttggtatgtattgaaggagaaagaagggggtactgatcttgatttcttctggaaaggaaaagagaatacggatttgttacaacaaacacagggaaaaatgttgacaggaaagcctcgatctttgggatttgtgggtaattatacatgggcgaatgaagaggaggataaagtagaaacaggtaatcaatgccttttattggcttcggaaggagatgtttcattggtgcggatttcggatatgaaacagctgggtgattttaattcactattctttgaaaatgcgccaactgttgctccacagaaatggtatgagggatcggaagaaagtggctttatcaatgatggatatctatatacctattcaggatatgatgatgcttttggtctgaataaattgtcgtacccgaaagagggagattataaattatcgagtgtctttacgaaaaatggtacaatgtctcctttgctatttgacttgaaatcaggacaattttgtacatcggcaaggaatgttacttctctttcttattttaaaaatgatgaaaattctgcctattctcttgcttatccggatatggaacctatttatgccggatttttggatgaaggaatgtgggaaggaggtaaagggtatgtggtgatgaataataaaaaggatggtagccgtgctatattttattttgatctgaaatgtttggttaatttcgaaaatgattacttgaaaaatagaatcacagatatacagactgtagaggctggaagtaaattagctgcggcaagctgtttcgggatgcatcgtaaagatcaaatgctttattttggagtaaatgataagttatattac

SEQ ID NO: 790 - DNA, 1200 bp, Butyricimonas faecihominis
attttattttgacaaaaaaccttttccccatcgaatcgttatatccggagagaaacaacaaaagaaatatgaaaataggtgctttatatgccttactatcagttataacatggtcagttatcagtgtcatcacccgtttttgcctgttaaactacgaggccaacatcctcgtgttcgcctccatgcagatttttgccgggggagtcgcgctattacttatccgaaaacctgtaactgcagaaggctggaaagcaggtgtcggttattcatggttgtacacgttgctgcaaatattccggaacttctttctagccgcagtttacctgtacatcaccagtaccgaaaccagcctgttaatcaacatagaagttgtcgtgacggccatactggcctacatctttttcaagagaagcccccacagcagcgacatcgtggggatgctcgtgatcacggtcggcattatcctatttatccgtaccctcccggaagccatacaactacgggtctccattctcgtctccctagcagttctggcaagctgtacacgagccatcgtggtagagaaaaccactatcgccagtcccaacacctccgtacgccaaaaatgcgggatctccggattcaccatgttctggggtggcacgtcggtcatgcttttcttgatcctgatcgccctcgtggaacactattttgccaaagaactcatggccgttcccttttcaatgctctacctgccgaaactcaccgagattttccacccgatgacgattattgccgcctgcgtgacaggtttcctactcacctcactctctacatacctgtactacgccaccctgcaaacggcaactgccgaaaccttcatgaccttccgggccttccagcccatgctaaccttcggtctggaggcatggattgcagtctactccatcgacttgcgtcccgacttggacacgagagattacatcttggcctgcatcatcatcctaggttccctactcatcttgatcatgcctccaaaacgagtggaagaaaatcgctcgaaacaatacatgacggactaaataattgaaaatggagaattgaaaattgaaaatgaaaaatatctcaatttcaagatggtattcccagagaaaactaaaagttaaaaactaaaagataaaagttgaaagtaggaaattaagaagcgtcgcccttgtgcgg

SEQ ID NO: 791 - DNA, 1199 bp, Butyricimonas faecihominis
taactctattgtgtttttatcaataacaaaactttttggaagttacaacattattaaccggttcatagaataatagacaatcgaataaggcagatagaggaactatgagttccctatctgcaatgtcactaactcatacccattccctatttataaggaataagacctgacaatgtcatgttaaaattaagagaactattatgcattctatcactcagcgttgcttttatatatttaactgcatgaggttcagccataggaatcaacgtactctctcccgaacctattcctaacatattttctctcatgtaacacattggcgtccaacttacattatcagaagatacttcaattgtaattttgtcagaaacataatatttctgagaagatgatgttgggcggtataatctttgaactacctttataccttttataacttgtacctcctttaaggttattaatatttcatgtgttctaggagaagttgcaacactaggttcccaccacgtatccggattattgtccaataaattaaccaattcttgtgcatcctcagaatctccctttacacttaaatctttaatagaaacgatatcgtctccctggatataattcaaatttggtaaagtcggattcccttttttattgatataaggccgagaaatattaaaataatgctcattatattgatcaacttgcaaacctcgcactttatttaacaaatccaaacactccaaacttcttgtttcattatctagtgtactaatatctacagaattaggattcaaaccactaagataacgatttttcccacatacaatctttttaagattcgagcaatagaataaatcttcaaatgaaacaagatcataatcaaactctaatacggtaacagtatcaacaaaacgatcaaaaagcagtttctgttcttcattttcattttttagtccataacgttgttgcaatacaactttaaaatccgaagagtatatcctttcatttgctaatgaataatcagcaaatgtgataagatccgtacatccctccaatttccctttacgagtgacaattatcggttcttttgtatttacaccttccaaatgaatcagcccctgttgagcctcctctttcaccaacaaatgttctttctttttattatagatatctgtataacaaagttttgcctcaacgatactatc

SEQ ID NO: 792 - DNA, 1196 bp, Butyricimonas faecihominis
atttggcaatggtatttaaaacgtattgtaccgctacacaaccttgtttaaccaatatgcggaaccattttactgcttctgccttatttgtaacaactccgtcaccattataataacagacccctaagttatattgagtctctgcaataccttgctttgctacctgacgtaattcttcgatttccatgattgtttgatttaaagtttgtatttgatatcaacgtttctgtcaaacatatgcaaagtgatttcttgaattattccaccaggatgatatatggtttgtccataatttgagaaagggatttggatatcggccagtggaacggtataaactccccaaccccgcatggtcatttcatcagtggtagaagaaatgactttcattggtttagttgacatggttactctgtctttttgcaatacatcacttccttctgtgtcgtaaatagttacagaataaccttcattgtcaattttgtgcgaagtatctttttccatgaatcgattttaatgtctaaggctatgtttatcttcaaacttaatttagagaattacattattattgaaaaaaacatttttcaacatcctctcatcttcggcgttacctttcgcaagtactattctccaccattccatggccttctctttacttttaggcactcctttgccttgataatagaaaagtcctaaaatgatttgagcagttgagtttccgttttttgctgctttttgaaaccattctgcagctttcgttggattttcgggtacgcctgctcctaaatcataatgtatggctaattctaattgagcttgtacatgaccttgttccgctgctttttgaaaccattccactgcttttgttttgtttgtggttactccttctccattagtataaaattgacccaaatggcattgtgcgtctgcatctccttgttccgccgctttttgaaaccattctatagctttagtaatgtctttttccaccactatacctttataccagcaatagccaaaactacattgcgctcctgcatgaccttgttctgccgctttttgccaccattcaacagctttctctctatctataggtgttccattaccataataataaccacttcccaacttaaattgtgcgtcagcatctcctgcttgtcctgctgccattaattcactgaaaaccataatcttctcat

SEQ ID NO: 793 - DNA, 1192 bp, Butyricimonas faecihominis
tcaagaaactcctccgtcacttcgtgccacctcctctataaacagaggaggagttggtgactcttaccgaaaaaagggagtatttcaactctccctctgtttatagagggagtaccccgaagggggggagggagtttgaaaaatgacttttgacacaccctcatgttaccttattccaccacgataataaagagcgaatccctcacgagggaatacccttgattataaatattcacgtcaatatagtaagtcccttcctttattgaattctcaaaaggtacttcaaaacaactatctcctctcagttgtacttcattataaaaagactcaacatcgccatcactggtatgtactcctgcaattttataatgaatcgggtaagttcccaatatcccttgtattggcgaagacacccaagggtatttccgttcaatccggtccgcctcttcttcctcatccgggttcttttgaacgatcatcgtgttaggatcataactgacctcatccacttccaggtaaccgacttttgtgtcatcacaggctatgaaagcgaaaaacatgaatagaatgtatatgatctgtttcataatgcttttgttttaaaattttccaaatgtaaagccatacactaatgaatgcacggccccgttatcaggctcaatgtccgcggatgcaatcatcacgatggaataccccgtatcaatggattgtatatgcaaggtagcagcacctacatccggagtatccttataagggttcaattttcgataaacccggatgcgattccccgctattgctgtaaactcgtcacccccatcatcaatgtcgccaacagcaaaactatctttcatatgtttccccggaatcacgtatctaagcatcatctctttccacacttccggctcaacatcttttatccgctcgattccattattcaacatatagcgcaggatggaaagtctggtcgggccaaagaaggttatttcaggatattgcgcatctttcccttcaaacaaggaagtcaatcccgcccattcaataacgaccacggttgaatcccagttgtacggatcattcttcatgtattccagtatattcccgtcaaaaattccggaagcctttcccgtgtctataaaattttctttcgtacaagctgacccgataaaaaccatcagcagtattataaatatct

SEQ ID NO: 794 - DNA, 1192 bp, Butyricimonas faecihominis
tattaattggttacacattaaattttaattttatctatctctctactttcaatatactagttggtgacttttccttagaactggtatataaagcttaataccttacaatttctcacctattggaattttgcattctaaactcacttgaaataaaaaaagggtttacctctgatgaagcaaaccctctataatagcataattgaattgttatccttttactgaatctaatctattagctaattctataatatcatcttttcttgctaatacatcaagccactcattaggaatagaatcactaccgtatatgatacctgccaacgctcctgtaatagctccaaccgtatcagtatcatcgcccaaatttacagcttttaataccgcatctttgaaactggaagtattaaagatacaccataaactagcttccagtgtatcaattacatatccagtagaacgtatgtcctttaattcaattgccttaaattcgttataagacagttctatcaaccttttaaaaggaacattttcttcaataaacatttccctttttaaaagttgtaatagtatttgttgcattgtctggtaagccttctcgcacgatttttgattaatgtattctatcgcaaactcgcataatgcaatacaagccagaatacttcttggatgtctatgtgtcaatgatgatacttcacctatgatcttgtacctctcttctggctccacgtttaggatataaggcaccaatggtaatattctcataagtgatccgttaccgttatctctttctctatccattcctgccagttctggtttacatccactttgcaaataggatattgctcttgccgtggtaacaccaacatcaaacacttttccgtgaggtgtccagtaaccttcataataccattttacaaagttgtttcccacatcacttagatcatatccattacacagtgattccgccaaacaaagggctaaagaagtatcgtcagaccatgtacctttaggttgattatgcgtaccgtactctctcattccaacaacaggattcttccctaactcttgtctatgttcaaattcaacaggaacacctaaagcatcgcctattgctgttcctaataatatatctttattcaagtttaccatacctgtttatatagtctatttaatgttctaaatatacataaat

SEQ ID NO: 795 - DNA, 1184 bp, Butyricimonas faecihominis
ttgttgtgcttaatacaagtgcggcgaagaatacgattgattttttcatataaataatgttttaaattttgctgtatccgggattctgacttccaatagtgggatttttctcgaattctgttgccgggatggggagtatcgtgtaattatattcctttatggcgggtttgatcttcaagatttcctctaacggtaatcgtgtcatggcggtccactctatcccgtcttcaaatattaaatttttgacggtttctttataaatttccaaacgtagttcatcccggttcgtgatggcatctatgacggaaaaatcagttattcccgcatggcccgagactgtttttaatagattttttgcatcctccagttttcccccggaaaggacgatcgcttctgcctttagtaagtacatttcagtcaaacgtatggcaatagattcttcttttttgtttcccgatattccttttacaataccgtagtccgttagtgtcgggtcattataacgcttttgtgctatgagcatccaatcttttcggggatcattctcgatcagagacatgaaactcggcatcgctgtgtacatggccatagaattatattcctgccagtaagtaccatatctggctgtttggtttgctaagggttgaatccctaacatgacctctttgctcgttagacctttcgtgttgaatatatcttcaacatgttcttccaattcgtagggaccgttatcaatgatatcagttgtgatcgtgaccacatctgtataatctgtaccttcaccccgtaaaatcaatactcttgctttcatggctttggcaatccattgattcccgtaaatattcttgttttctagcggggcgtttttaatggcttcttcgaggtcttccagtatgaacgtgtatgtggacttcacgtcactcctgctttttgcgatattatttgtcgtgacaaattcatcacggatcagagccccgtattcactctccgtgtcatcaaaacggcagaaataacgcagcaaattgtagtgtccgtatgctcgcattaattttgcctcggcaatgatttctgccttgcggtttcccgtgaataacgtggaggataatgcttccatctgttcgattaccccgttggctgcattaattaaggagtaagcattcgaccatgtatttaaaatattatta

SEQ ID NO: 796 - DNA, 1183 bp, Butyricimonas faecihominis
ggaaacaccagccaaagctgatgcctccttccttttcagagtgggcaatatctaaaatattttttgacttcctgattcctaggaaaatacaataatcttgattcaaaaaatacctatttaacaccaagtttcaatatgtgatgtttgttttatattgttggtaggggggggtgaaaggtatcttatgaataggagggggagtgtttatgttatactcccctcttataaagaaatttattaatgttttaccttttcattattagtggctctgtggtataacaaataaaacttgttaatgctagcatctttcactacttcaatttttgcttgtttatctccacaccattcagagtaaacctttctagtggcatctttataattcatgtttttgacttcatccatgtagaattcatttttaacaagatgcccagctttttgatctcctacatagtacttgatatgatttgaaaaaattaaaggagattcattgaaagagaacttttgtgtacttactttttgctttgctcttatactcctttggctattgtaatctgggtatagtagtaaatcacaattcctataaagggaaggattaatcacaaatcccctgactgcttttgttgaatgaggtgggatactaattactttttgttctgcaacctcaactcccacacttttacttgctgaaaaggaatagcttgttccttgactactgcttgattgtgatgatctgcccttatgacttgtcttgtatggctgccctatgaatcctattggataagtagtagaagaagagtattcacctcttgactggctattcatgaacattgaagttatagaagaaccaaagctttgttgttctataaatgtcctgtcttgataatagtcattagcatacccatttttgataaaaaaacattctgacaaatcaattttaatcatctgatctgttttgttatgaaattcaaaaccagaatatcccccttcacaccaaaagttgtagctaatcttacaattggcatcttcataaaccaatctatcatctttgatagatatatcctctttgccttgaatttgtactaattgtaggtagttgttgcatgaacaaagaagaaccattaaaataattggaataattgttttcattatgataaaatttaaatatgatattattgctttactt

SEQ ID NO: 797 - DNA, 1174 bp, Butyricimonas faecihominis
ggatatatataatattgatgttgctcttatccggtgtgatgacctatgctactgatgtcaagacgctggcggaggaggcaactaaaatgtatcaggaaggcgactatcagaaagcgattgatttgtataacgagatgttgtccgatgacatggaatctgcgaccgtgtattacaatttgggaaactgttattacaagcaaggggagattgcaaaagccatactgaattacgaacgtgctttattgttgcatccgggcgataatgatataaagtataatctgacgatggcgcaaaaggccacggttgacaatatcaaggtattaccggaacttttccttgtacgttggtataatgctttcgtgaccgctttcacggctgatcaatgggcgtacgtgtctgtcatcctgtttataggatttctgatcatggcagcgttgttcttccacgcgacatctatatctttaaagaaaagttggttcactttagggataatcatgctgttggtgtccgtgatgaccattttctttgctttgaaacaatatcatcggatgactgacagggatagcgggattattatgactcccagtgtagtggtacgaggggctccggataatagcggtaccgaattgttcgtgatccacgaaggactgaaagtacaggttatcggaactctaggagattggtacaacgtgcgtttggccgatggaaacgaggggtggattgctaaaacggacttggaaaagatatagtagcgggatacataaaatgtacagtgaaggggatagctgcaaaaataagcagttatcccctttattattgggaggttgtatgaaatgattaagtgattaaaagagcgttgggtagagggtcggaatcactaaatcggaaatcactaaatcaaaaaattagtaagatctaaagttaacaggatgattaacaacccttttcccggggtgatccatacccgttacatgacggcagggtgactgttaggcgacagttaggcgccatcgcccgattgtcgcccgattatcgcccgatcatcgccgccattttaacagataataagcaaaaataacatactcgaataacccgtcaaccgggccaataacaaggctattcacgttcaagaataatattgcgggccattatatccccggtaaagggctgggag

SEQ ID NO: 798 - DNA, 1169 bp, Butyricimonas faecihominis
acattttaggttaaatttacgttaaaatataccatctcatacaaaacaaaactcgaattcatcgtattgcctccatcacacaccgatccaattgctctcctcgcaatctggtcccgacaatccgattatctttatccaaaacaatcaagtaagggattccctgtatacccaacatcttcaccaacggatttccccacgcctgtaaatcagacacgtgaatccaaggtaaaccgtcctgttcgatagccttctgccatttatcttttttatcatccaacgacacgctgataacttctaaccctttgtcgtgatacttctcgtacaactccttcacgtgaggattctctgccctacacgggccacaccacgaagcccaaaaatcaacaatctttacttttgccttcacggaatacaaagatacggatttaccttgcggtgtctgcaaggtgaagtctggaaataaagcccctttcctcaaatcaacttcattctcgacgtatcgtgccagaattttcccgagaatagaattacgggcagaatcaccgaataattcatattttcccctcagcatcttgtttttattcaaggcagacaatcgcacgtaaatcaaacttgcggacacgaggttatcattctcccggataaactcgtcctccttcttctcgtaaagagaatccaatccttcgagcaaagcccgcacatggaattttccgaaaagatttttttcttcggcacacttttgatactcgccttccaacgaatcccgtttttcccgtatcatatcctccacttcacgtttaaagcgttcacgtacctgttgaagttctcccccggtaactctccacgtcgctggttgttccttcatatccactagaaccgaataggacgtattttcaagaaacatgggaattttcaacttcctgttctccacttccagccatacgaatctaggcttttcaaccattcccgccagttgaaaattaccattccgaacctccactcttcccaacgtatccagcttatcggccatattcggggaaagtaaaaatactttccccgaataacctgcaaagtttccctgaattatatatttcgaagttgattgacatccacacaaaagagccatccacatgaccaaccagccactcataatcttcaccatatattct

SEQ ID NO: 799 - DNA, 1169 bp, Butyricimonas faecihominis
tctccataatcaagatagaatgaccatttaataataataatataataaatctataataaattatactagtataatactactataatagtcaattcccataccacaaacaatagtctctcgtcatttacaaaaacagtcgggaaaaaaaccgtccaaaattttttactcaaataatgttatttagattcattctacactttgaatgtgtcaaatcaagataaaataaccactctaaaataataagtaataataactgtcggggaaaaaagatcctaacataatcaagatgggatgacctaatgaagtgtcatttaatcatcaatatgtttttaattcgctaataatcagttatatataacgcaaagaatgaatctataaataaatcaagatagaatgaccaaataaccaaaatcttcccgaaatgaattacgtattgttcgataatcaaggtagaatgacctaatgtgatcggtttcgtggataaaattatctgtaagcaactaataatcagttcataaattttagaacttgccttcgtttttttaatcaagataaaatgaccagatgaccactttcttgcctataatcaagatgagataactaggtattgattggttttgtaaaacttgcaattctattattaactataataacatgtgaatttatgcgtttgtttgtcttctcctaaactttaatgtgtttttagtatacagcttcatgaaacattttaattgcttctatgagcttaaaatcgatgttttgggagatgtgaaaaacagccggacttttaatgaaaatgatgggaatggatccactagatagtttttctatggaaaataaaaccactcccttcattccgaagaaatcaaggagtggcatccaacaaaatgaaacaaaaaacgtttctttataaaggtgtggagcttaataattctgtgtttgatatttttaaacgcagatggcgacctccatccttttcgtatagttcgaagatgcatattttatcatcttcaagtgtgaatttatccatttggataattagacggaggttcgaatgagctttgatttcttttatctttttgcacaagattgaaggaacctgaatatcctgacttgcagtttcttttaataattttttactcgatgttgtcatatatacgttatggaag

SEQ ID NO: 800 - DNA, 1165 bp, Butyricimonas faecihominis
gtataaggttgtttgatgagaagtgaagtcttttatagagcgattgtcatgagaaagggagagataaagaaaataagcttatggggggataattttgttttagtttcttcatttctcccttgccgtatggtattggataaaatgaagaaattaggaaatattttacagaaaagtcgaggatattatattggattgcgacaggatagctcttgttgaatattgaattaaactcgtttaacagctttcatggcgttcaaccggcggcggaatgcgatggctatattcttgcgtgcaaattcatttaatcctctgaaagtggtgcgttgttttaactcttccaaaggcataataagaagaagtttggcaagacactcatctgcaaaggagttggatacgacgttcaccccgctaaaatccagcactaccttatcattttcctgcataagatctaacaattggaaacgaactttttctcccagttgtcgggtacctaagttctcgtttatcgtgacaaatttgaatgttatcatattcctttatattaccatagttgttccaggtcatcaattggtgtaaacgtctcgttatacaaagactcacaatctgttcggttatctactatctcgttgggatcaatctcgcggtttgagtggatgtcaaaatagacaatcgtaccttgccatgacgatgatggatatacatgagtctctttaccatcatacaccaatatgtgacgacccgaatgaatttccaatcgtattcccacgttttttataagccgagacgttgaataaagtccgaatcccattcctttcccatcagtcaccgagtcctgaatacttttttctatagcttccggttccgaaagttgtgcatatagtggattttgtgccaatgattgctggattcccatcccatcatcagctaccaatatctgaatcatggacttggtggggctgtataatgaaatggccgtaccacacgtctttcctgagtgggttaatacattatccaatacttcgtagaagcaatagcttaatgcttgcattacactcagttctatatcgggatagttcgtgagtgattttacaatatccgagtatacattataaatattctccgtatcgaatacttcaatcaagggttgtgcattacaatccttaaa

SEQ ID NO: 801 - DNA, 1164 bp, Butyricimonas faecihominis
aatttaatccggaatgccatcaattatattcacctttaagcctatcatcgacaaaacaataaatcccggttcaaccaaagtcaaaccgggaaataaacattgagtactaaataaaaattactctcgattcatattatccaactctatcttgaaaaaccaagggaataattcatgtttggctgccacgtgccaagcattcacaatcttcccttccttatcaatcaaaatatatcggggaattcccgtaatacaataatctttcgtgaaattatctttctctttattgatgatcaaatgaggaatcttaccggaatattttttctcttttaagaattttaaccaacgagatttagcctctattccatcatcagatatggtcaataacaccaaatccttctgatccttatattgatcccccaaagccatgaaataaggcaacccctcaacacatccaccacaccaagtagcccaaacatcaataaacaccatttttcccctgaaatcggaaagtttcaccatcttaccaaattcatcttccatctcgaaatcgggagccacctcccccactcgtaccggataatattgtgcttttaattcatgcgccttttgaattgttgactcagttttggaacaaagctcaatatcttctatcactccttgaatcgcatccgtgtatccattttgttttaatgttgacactaatgctgtcagcacataaggattacgaattttttcgctttttatattatacaaaacataagtagctctatctaactctgataaatctggcataaataatcggaaataaccatttaacaaattagccacgtcgatatcatcaagcaattccagacttggagaatccagatccacccccttaattctttttgacaactcatctttcaatcctttatctccagtttcaaacacgtaacttcctaaactccataacaaccctttagcttgaatcaatcgagccttttctttcgcctctttattttcaatagaatctataaccagtccaacgtacttttctacctcatttattttttgaagtaattcatccgtattcaagtctctcgggattaaacggtataccttatctactcgttccagtaaagccttatcatttacttcttgtgcgaaacaagtagatcctacccc

SEQ ID NO: 802 - DNA, 1157 bp, Butyricimonas faecihominis
aatttattccataaaatattccctcatttagtaataacatatatagaactttctttatccaataaaagcaaaccataaaaacagaaatactttattttttcttatttttttttaataattccgctatcttcttacggagatcattaccccgaagtcctttggcaacaatacggttctccgcatcaattagaaaaattgtaggaagatcattcaccatatagagacgggcaacaagagaatcaaaacctcttaaatctaaaccgtttatccataccataccatccaaacctatagtattcttccatttaacccggtcatcgtcaagtgaaatactgataatctctaaaccttgtggacgatattgcgaataaagtttcactaactcaatattatcttgccggcaagaaggatctgttgaaagccagaagtacactaatttcaacttggcggggatatcatacaacgagaacaaactaccatcaggcttttctaccgtgaaattcggggcaacttttccctcaaccaattttgcatactgatctaaggctgcagcgatctgtttacctggaatcgtagcgcgagctccttctcccaaaagttcatactttaaacgtaattcctcttctgtttccttgaggatacccaaagcaatcacatatacagtggcatattcgtcaggattcgccttgatcaaattcagcgtggcattcaccgacatttcgtaggctttattcacctgattttgcaaagcttgaatgtttgctcctggttgttgagcttctgccacaatcttagcctgttctgagacaaaagattggctaattcgagtgtaatgagtcaacaattcttgctgtcgcccaccttggatcaacgccccattatcatttacgttaatcataaaattcgtgttttcaagaatcaagggaatcatcccattcccatcagacagtgtaatataaaccgccacgggaccgtttacttttcccgtaaaaacaaatactccattcttaatttgagttattcctaatgtatccgatttacccttttcaccatttatcaacaataccttaccatccggtacaccactgattttaccactaatttgatagccttcttgagctttacaagtgaccgagaagattatcactacattaatc

SEQ ID NO: 803 - DNA, 1150 bp, Butyricimonas faecihominis
gaaattatatggagagccttgcggaacgagtgttcatcggaagagctgatgaagttacaggagtggcgtaatgagactcccgataatgaacagatgtacgaggatataaagggaattgcagggatgggaaactttttgaaggggattgattccttgcacaaggaaaatgctttggaaaatattctgaaaagaacgaggcagagatcattggggcattctcgacttttgaaatatgtggcggtatttcttttacctttgttgttaggtggcacgttattttattttctcaagtttaaacaacaagctggcgaaaaacttcctgtatctgtagctaaacagatcctaccgggaggacctaaggcgattctttacctttcagatggtcaagtgattgatttgaaccggaccattgattcggttatcgttgataaacattcaggacaggaaattacgttatcaaaggatataaacgccttgaattatagtggtgtgacagggaataccactcaaccaaaagagttagcatacaatcgaatcgaagttccgaggggaggcgagtatatgttggtgttatctgacggaacaaaagtgtggctaaattcagaaacccgcttagagtacccgcttacattcggagagtatagccgggatgtacgtttaagcggagaggcttattttgaggtgacaaaggatgaggcaaggcattttaacgtcatcatggagggggcgacaatcgaggttacgggaacctcttttaacgcatcttgttacccgggagaaggacaatgcaaggccgtgttggaaagtggtaagatcaatttaagaacagagtatggggtggcagccgttgacgtgggcgagtgtgcctcttatgatattgtttcgggtaaagtgaccgtggaggccgttgacttgaaatacttcacctcgtggcgatacggtacattttatttttacaacacgcccttatccgagatcgttcagaagttgggacgctggtatgatgtgaattttaaatttgctgatgaatccttgcgagacgtgtgtttttccggagctgcactacgaagtaaatcaattgattttatgttagaattgttggcgagtacgcaatcattgaactttgatatacagggtgatggaacaatca

SEQ ID NO: 804 - DNA, 1130 bp, Butyricimonas faecihominis
gttttgtattatccaatgaacaaaaggtttatcaggagaatggtattacttatctccctatttatgatattatgttttttgagccgggaacaaaagttgtgggagagctatgatatatagctatgcttaaaatcatcgtgtaaatatttgcaggtatttgaatgagagttatatcgtcagagacttttttagaggcgtgatcgtgatttttgttttttcttttatagggtcgaaatatattcctctgcgtagaactaagtttataatgagaacctgttgagaagctggggaaatcctaaggaaataatcctcctttttcagagatgtttcgaaatttattcgaagttcattcatgccgtaatatttgagctacgaaggatcttcgagtaatctctgaataagagagagtatttgggtaggattacttcttcatttgggttgaatttgtgttatatgatattttttcggctataattttatttgttatgcttgttccttgggtaataatactttaattctatggtttaactatctcttgggccttactggtcgcttcctcttacgttatgttcccgtcacgtggcggtgggataacgattttggatgtgggaagtagcggttgagaggtagttgaacgtaagggaaagggtagtaaaatcttagtagcacaatgtaaggaaatgagattttagtttttgtttggtagttggtatgttttaaaatagtcactatgaatgattatatctgagattttttgagcgttttctctacgttctttttctcggttagagttagcaatagaatcactcatgagtaaacttcttccaacacctctccaagaggattggattcctgttagatcaaggagagtcgggaatatatccatttgtttgattgtattctggggtgattttgtgattttaattagggatatatggtgagaggaatttcttgagcaatgtattcttgggcgggagatgattttaaaagaggtgtgtgtcgtgatcactaacgatatttttttagtaaaaagaaaggagagtgatgttgttaatatgtttaaaataacgttgttataatttttttgaagcaaattatttaaattagaatgtttgtgaatagaatagttt

SEQ ID NO: 805 - DNA, 1127 bp, Butyricimonas faecihominis
taataaaagaatgctgccaacctagtattcaagatagaattatgatattgactttagaaaaggaaatcttaggaatgtatgatatcaagattggcagtgacttaactgatatttttcctaaatgtagaatttcagtaagagaacaagtaggtgaaccattctggaaattggaagatagagtacaatctcctaagatgacacctgcaaatgaagaaaaaggtacaccagcaatggttcatcttcatgaaggattgcctatctacaggcaaatatgtttctgtttgaatgaagaaaatccaaactataatgatgcttttgtagaaaccactgaaatgatcacagaagaagaattcaatacaagatacaaataaaaacttcaaaatcaatatagatcatgaaccaacaagaaatagcatttttgaggctactactgcctatcattaagattggattaacaatatgggcagtttatagagcaaaagaattaaacaggagtagatgggggtggggtgtatttactttcttcttaacactacctgcatttatcattttattgtgcttgggtaagaaaaaagacaagtctagcaagaaaatagattcctctcctatcagcaagaaaattgcaaataaaattccattcatcagtttggaagtgttcaaacaacatttgatcaataaaaattgggtgctattaagaaattcagaaggtcatagacaagtgtatatctttcaaaaagaccaaacattactaatctcacaagcaggagaggttgataagggaagatgggaagaagttggtgacaattccatattaatagaggttgacaataaaagcaccttgtacaaaccaactcataaaacagaacatttgttgatcttaaaggtagatggaaaggaggaatatcttcattttgtggatgagaatttgtatgaagagggatatagaagtattgatgaaattaaaattgctattcaaaagcagcaagaaaataaaagtaatggtgaaacatactctgcaaatataacaccagaagaagagcagaaattacaaaatcaaagaaccttgggttattttcttataattatccttgttgttgcagtaatagtaatagggatgtatatataaa

SEQ ID NO: 806 - DNA, 1125 bp, Butyricimonas faecihominis
aaataaaaatgtatatggcaaaagagattaatccttttattgttacaggtaagattgccccagagtatttttgcgatcgggtacaggaatcggctcgacttatcaaatccttgacgaatggtaataatatggtaatcatttcacctcgtcgtatggggaagactgggttaattcgattctgttatgaaaaaccggaaattaaaggacactattacactttctttattgatattctccatacatcgagtttaagggaatttacttatattcttgggaaggaaatatttgaaactttagcacctaatagcaagaagatggttagacttttcatgcaaacactaaagtctatcagtggaaagttcggttttgatcctctgactaatttacctacatttaaccttgaattaggtgacattgaacgcccggaatataccctagaggagatattcaaatatctcatgtctgcagataaaccctgtattgttgccattgacgaatttcaacagattggcaaatatcccgaaaagaacattgaggcattgctaagaactcatatccaaaaaatcgagaatagtcatttcatttttgccggcagtgaacgtagtatgatgcaggctatgtttctctcttcggctcgtccgttttatcgtagctcggatgttatggagttggatgctattgataaagatatttacgtggcatttatctcggaacattttgaacgtcgggatcgccgagtcagtacagaaaatgcagggaaagtctatgacttatttagaggacatacattctatattcaaaagacattcaatgagtcgtttgcggataccctcatggggggcgagtgtacactggatattattcgcaatgcaatccattcgatgatcgattataatgacacgatatttcgcgaaattttgtctaatattccagagaaacaaaaagaattgttgtatgcgatagccaaagaaggtgaggctgtacaaatcctttcagctagttttattaagcgacatagtttagcctcggctagttccgttcaaactgcaacaaaaaagttattggaaaaagacattattacagaaataaacaaagtctattctgttacagataaacttttcgcca

SEQ ID NO: 807 - DNA, 1125 bp, Butyricimonas faecihominis
aattagaattattctaaatttttacaaaatacaatccggaatgttgcatttataaaaaagatgacgatatttgcactcgatataaaattgtaacaattacaaataaataatgaatacagttcaaggaacacgggaatatttacttaagtataacatcaaaccatctatgcaaaggatagcaattatggattatttgatggtacaccgggtacatccgacagctgacgaaatttacaatgctttatatccgaccatgcccacgttgtctaaaacgacaatatataacacgatgaaattgttcacggaacagggtgcggtgaaagctctcgtgattgatgaaaaaaacgtgcgttttgacattgacacgtcaagtcatgctcatttcatgtgtttggggtgcggttgcgtgtatgatcttccgattgagaatcaagaagcgatacaattagaaggagtaggggaattaatcatcacagaaattcatctttattacaaggggtattgtaaaaaatgcaccgaagagaaaagaaaaaacatattattataacatttaaaaagtgcgttatgaaaaaatttatctgtactgtatgtggttacgttcatgaaggagatgaagctccggaaatttgtccgcaatgtaaacaaccgaaaagcaagttcaaagaattagttgaaaccgaaggtgctttgacgttcgtagacgaacatcgtcttggtgtagcaaaaggggttgatcctgaagttcttgaaggattgagagcgcatttcaacggggaatgttcagaagtcgggatgtatttggctatgagtcgtcaggcagatcgtgaaggctatccggagattgcagaggctttcaaacgttacgcttgggaagaggcagaacatgcggctaaatttgcagaattattaggagaatgtgtttgggataccaaaacgaacttgaaaaagcgtatggaagcagaggctggtgcttgcgaggataaaaaacgtattgcaaccttggctaaaaaattggatttggatgctatccacgatactgttcatgaaatgtgtaaggatgaagctcgtcacggtaaaggtttcgagggattatacaatcgttatttcaagtaatctatcatagat

SEQ ID NO: 808 - DNA, 1123 bp, Butyricimonas faecihominis
ctctattaggatacaaatctacagtattactgatctgttcatatattgttttaagaggataagcatgttctgttttatttgtttgctccaataattttatatagaagagagggagtatatttgaacatgaacgctcttcgtatcccttagtgtttgtatcatctaccaattggttaagcatagacgtgaattgttcagaaagtagttgtatgtattccgcatcaaatagctcacgaacataattccaatcaaaacaccatttattttcccatgtatacataacaaggtctatataagtaccaggtgcacctgtctgtactttaggcgcaccaattgtcaaatatctagatgaatgactgatacctttgggaagcatattgatagaattactaaaaataattgcactcaaagagctttgttttaagccttcctgttctgcgatttttctggacaattctattgaagatattggatactcaagcatggttcgtacaaattgttctatcttacgtgcaatagaaacaatcggttcttgtggagatgtttggatacggacagggaaaatatcaagaaaactacctattatattttttgcattaggtaaatgctgttccctgttaaatacaggcatgttgataatgagatcattttgtccagaccacaaattcatcagtttaaaatagcatgccataagtaaggaattaaggcatataccagaagtatgagaactgatttcaagaactttattcatcaataaagaatccaattccgtatgtaaggtattaaaatggactttatttattaaagatggctgacatttcgtgggaatagatattttctctggtaaatctttaaacacctttagggcaaaatccattgcattctgatatcgctttgtttgccttctgaatctctccacaaaaacatagtcagaaaaagttagacctttttcttgttcaacagttatttctttaccagcgataaactgatcataagttgatgttaattcttgaaggaattgaaaaaagctgaaaccatcaattatctggtgatcaatatgtataattaattcatgttcatcttcccctgttttataaatattacaatagaataaaggatactc

SEQ ID NO: 809 - DNA, 1114 bp, Butyricimonas faecihominis
tattaaaccaaaacataatagtggcctcgtgggggctatcaaacatttgtatcaaagagtcctatatttgtttttctgttgaaggttttaagtataaaggaagtgttgttatatctgaattcaatgatggatataaggtaataatgaacaagcatactttattctgtaaacttgattctcttgttatcaatcttgatgagtttatagagaagacaacaaattacgaaaatcgaatagatgctttgttggatatttagctaaatcaaattcaggttagtgaaataatacccacagaaactgatggcatttgtccaagcgagttaaaaatcaataaaatttgaatctttattttttagaatgtaccattaaaggttgattatgaccatatttctgatttattatttgcaaaattttggatactaccgttccggattagaattactattcttgatgttgctttatgactttttcaagttctttcatgattttcttttgccttttctccttgtatttttgttgtttctcagcgttggcaagatatatcctgtatttaaaatcgtatttttttagttcaccattgacttcaatcgggatgattaaacggatgtaataatcttcacctgttatttttatgattttagggttaatgaggcttgttactttattatgagtaaaatacgtttcacccaatattgattcgggagcaattttttcttcgtaaggtggataatattcaagagaaaaatctttcgagctaacgaatagaatacttccacttattttacaagctacgaatgaacaatcccgccagtaaacaatcatatcattttttgtcttattttcaatggaaattgtccaaatggaataatgatctggaatgatttcgaatttgatatccttatcttcatagtctaaatcgtcagcctcttcacgttcaatataacaatcccgtacgatatatttatatacagctttattctttgctagttgagcttcagacttcaaggatgtaaccgagaataagattagaaatataaaaaatgatttcatgttatgccccttttgttttatttatacaaaggtagtgaatattttaatttgatatgtgtaatta

SEQ ID NO: 810 - DNA, 1111 bp, Butyricimonas faecihominis
aaataacaattaaaactatgtcatttaaaattcttgcgatcaatccgggatcaacttccacgaaaattgcaatctttgaagatgaaacagagaaatttgtaaagaacatcaaacattccgcagaggaaattgcgaaattcgatagcgtggcttcacaattccaattccggaaagatattattctttctgaactgaaggatgccggatttaatattaacgagatcaacgcgatcgttggaagaggtggtttagttaaacctatcgaatccggtgtgtatgaggtaaatgaagctttaattaacgacttgaataatcctcctcttggcgaacatgcctccaatttaggtggtctgatcgcaaacgatatcgcaaaatctcttaacaacggaacaaaagcttatattgcagatcccgtagtagtagatgagttgcaagaggtagctcgtttgaccggacatcctgatttcacaagagtatcaatcttccatgccttgaatcaaaaagcaatagcacggacttatgcaaaagaaattgggaagaaatacgaagatataaacttgattattgcgcatcttggtggaggcgtttctgttggagcgcatgatcacggacgggtaattgacgtgaataatgctttggatggtgatggtcctttttcaccggaacgttcaggaagtcttcctaccggtcagttggtaaaactatgtttcagcggtaagaaaaccgaagcagaaatcaagaaaatgttgaaaggtgcaggcggattagtggcttatcttggaacaaacgatgcttacgaagtagaaataaaggcaaaagaagacccgaaatataaattggtacaagatgccatgtcttaccaagtaggtaaagctattggtgaaatggctgccgtgctaaaaggtaaagttgatggtatcctgttaaccggaggaatcgctcacaaccccttcttggttgactacgtgaaagagatggttggatttatcgctccgataaaagtatatgccggagaagatgaaatgagagcattagccatgaacggactgatggttcttcgcggagaactttctggaaaaatctacaagtaataatttaggattagtaatag

SEQ ID NO: 811 - DNA, 1111 bp, Butyricimonas faecihominis
tccctctataaacagagggagagttggattactcgttgttttggggaaacttttcattctaaattttaaattttatattttaagttccattcttcgtgtagggcccatgcggggagtgcaggatcattttaaattttctgatttatttatttttaaattttaatgttatggcaaaatttaattcttatttattaggcaaggtaaagaagtccgttggtaacgtgacgatgtgttacacgaacaaacagaatatcgcaaaggcgaagatcttttcaaggagggataacccgacaccggagatgcttgatcaacgggcgaagatgaaggttctggttcagttgtctcggagattgattccggtgattcggaaaggtttcgtgggtatgggaaatggtacgacttcgaatgctttcgtgaaagcgaatcaagtagccgtggaagtggacgagaaacacgtggcaaccatcgtgtttgatcagttaaagatggctaccgggttgttgtacacgcctaaggtaactgtaacgtacgcctcggagagtaagatgtattctttcgagcaggagatgcaagaagaagaggaggggtatgcgttggcggatgacaaggtgtatggcgtgttgttggaaaccgtgttgaatcgtgccaagattgttccgttgagagatcggggagagaatggtaacacgagttacgcgcttcccgaggattgggatgaggctaacgtgaaggtgtattgtttcgcaaccttgaagaacgggagtgcggcatcggacagtcgttatttgacggtatgataagcgtgtacttttttaccggaatatttttcacgctgggatttaatgctttcctctcacaggtagctgatgatttcgtgacaggggtgttgagtatcgtgggaggagtgattagctcggtcgtggtggcttggtgtaagaatcgatgggagcggaaacgttccggacgataagggaaaggggtggcttcggctgcccctttggtttgtaaagtgagggaggagagttttcatcatgatgaaaactttgatctaatttgcttgaagttttcattataatgaaaactttttcgtatttttggaagagttttaatt

SEQ ID NO: 812 - DNA, 1110 bp, Butyricimonas faecihominis
atttcgtgatgaccgatttaatgattccgtgattaataatcactaaatctaaaatcaccaaatcatgaattatgcaatctaaaatttaaaatctaaaatcaagaaattaaaatgggcattgtaattctcggtattgaatcttcttgcgacgacacctcggccgctatactaaaagacggggttgtgctatcgaatgttattgccagtcaaaaggttcacgaggcctacggaggagtcgtaccagaattagcatcccgggcacaccagcaaaacattatcccggtggtagcgcaagctttaaaacaagccggagtctcagaagatgaagtaaatgcagtggcttttaccagaggccccggattactgggttctctccttgtgggaacgtcctttgccaaaggattcgctattgccaaacaaatacccatgatcgaggtgaaccatttacaggctcacatcctagcgaacttcatcaaagaaccgggtgtggaatcccgtcacccgaaattcccgttcctaaccctactcgtgtccgggggaaactcgcagattatcatcgtacgggactacctagacatggaagttatcgggcagaccattgatgacgcggcgggagaagcatacgacaaatgcgccaaggtaatgggcctctcttatcccggaggaccggtaatcgaccgtttggcaaaagaaggtaacccggaaagattcacgttcaacaaaccgaatatccccggattggattatagttttagcgggctgaaaacctcgtttctgtacttcatccgggatgaaatcaaaaacgacccggatttcatacaacataacctcaatgatctttgtgcatcactgcaaaaaacgatcgttgatattctcatggccaaattgaaaaaagccgctaaacaaaccgggatcaaacaaatcgccattggaggcggagtatcagccaactccgggttacaaaaagccgtgtatgacgaaggcgcccacctcggttgggaagttttcatcccccggttgggtttctcgctggataacgcagggatggttgccgttacgggatattacaaatacttggcatcacagtttatcggcttggaagccccagca

SEQ ID NO: 813 - DNA, 1107 bp, Butyricimonas faecihominis
attataattaatatttttggacaagcaaaatcaatgccataggtaattctcaaatgttaaataatagaagggaaaaaattcttataaaaagatgacttttgtcatgttttcaaaaatgagatagatgtatattcgcggccgaattaaaatcagataaaatggtgaatatacttttgaaagagaaaccgtttacccgtgagtggtttaagacatatgctttgcttgtcgggggggcttttatcttggcattgggatatagttgttttatggctccttataaaattgtaccgggaggaatttatggtatcacgattgtcttgcaacataagtggggtttcccgataggtatggcggctctttgttttaatttgccgttgagtttattggggatgcgggtgttgggagctggttttggcttaaaaacatttatttgttttatccttgttgccgttttctctgacagtttaccaactatattattgatgcttatgggggaacctatccctacggaccctatggttgcgctcgatccttttaaattaggggatgaagttttattggcgtgtatcttcggtggtgttgtgatgggaacaggtgtggggatgattatgaaaacacgtgcatcaagtggtggaactgatgtgctggcaaatattttgcacaagtggacacatcgttctctcggtcaaatgcaaatgtccgtggattttgttatcgtacttttcggattccttatgtttcaggattggaaggttccgatgtattcatggctagttattttcctcatgggaaagacgatcgacatgattctgcaaggttttgacagtgaaaaaagtttctttattatttccgataaaatagaagaaatacggacctatatattgaatgatttgcaccgcggtggttctatcgtgccgatacagggtatgtataatcgttcagataaagaaatgattatgactatggtcaaccgtcgtcagatggttactttacaacaagcgatctataagattgatccgaatgctttcgtgacgatattcgacgctaaccagattctagggaaaggattcaagcggttggatgcggaatgaatcaagaatattattt

SEQ ID NO: 814 - DNA, 1106 bp, Butyricimonas faecihominis
atatgggattgagttttgaatttatagatggattgaatgtaagggtagatggtggtattgattataatcagaataatcgtaacttctttcgtcctagcacgatggatgtatctaaaatgaatgaaaattatatagaggagggaattacgcggaatattttcatgcagggagaggctcttctgaattatagattttcgatccaagagaaacacaattttgagttattattgggaatttctatggataaatctcaattatttgaaaatgatgctgatgctcttggtactccaagtgattacattcactatatacagggaacaactcctattaaatacacgaaacccgaatggggtgatcccgtggcttatgaaaccgtgcatgcttcttctaaattggaagaaaagataaatttgagctattttggtcgttttgcttataattttaaaactcgctacttgtttgagtttactttgcgtcgagatggttcttctgtttttggtgaagatcaacgttgggcaacatttccgtcagtggctattggttggacattttcagacgaatcttttttgaaatcagttaattggttaagttatggaaaaattcgagcaagctggggacaatccggagtacagtttgataaggcttatcttgctcatggattgatggaaataggcgctatttatgatggagaacgaggaatgagggctagcggtatcttgaatcggaaactgggttgggaacaatcggatcaatatgatttgggattggacttggattttcttgattatcggatcaaatttaaatttgattattattatcgttatacgaaagataaactatggaaagtaaacctgccaagcggaggaagttttttaggtggattctctaaacaatggcggaatgccatggaagtttctaatgaaggtattgaatttgaagttacttgtgatattcttagagagactaaagttacttggcgaagtaaaataacagcttctagaaactggaatcgttttgaaaaatcttattcgggtaaagatgaggatacgtttattataggtaaacctcttttcaatatttatttatataaagacaatggctattat

SEQ ID NO: 815 - DNA, 1105 bp, Butyricimonas faecihominis
gccttaacttccagagtaatgtatccgtctttaccgggtaccaattctttgacacggaatacggctttgttcgtgtcgtagaggtttctgtcaggccattggctaaatctttgcaagttaataacataaataccttcccatgtcggatgtgtactttctgttatactcactccatatgtaatgtctgtcgtgtatttgtatacatcgatgtaagtttgagatgccgagatactagcttgaataaatccaagtttattttgtgcgtaacttccttctgtaatggctgcatttaaagttgggattctgtaaggagccatgatatcatattgattcatgataaaaccccaactggcagacgtattatgcgttccgagtaagggatataagcgttgctcacggtaatatgtttccacttcatcctcttcgccatagaaataacacaattcgatttccatgagttcttccatgctcatttgttgaacttgtgccaatgtgaaaacttctcccgtgctaagtttaagaaaatggccatgttccgtgtttccttgcgctcctagggttaccgtataggattttaactcatcagcgaccaaaatggtaatcgttttattaatcaactgttttggctggttattatccttacataccacttgaaaattatacgtctggtaatgtgatccttcttccggcagataatcatttgcccggaacgagtaggaatactggctcttgttgtgtagctcggtcgaatccatcgtcagcgggaaacctttcaggtatgttccggcattatccttgacgtacaactcttggatgaatcctttgttcgcgataaaatcgatatcaattttgacctcttctccgggagagacgatgattgaatctttttctaccccgtttaatttcacgacgagactcgggcgaggaggcaactcgtggagttctttgacgcatccttgacagaatgtcaggaagaggcaaatgattaacaaatagtttcttgttctcataaaattggttttaaggtttaatgattggtctgataatttctctgtcattaaattgattttagtttatattattgtttaaaaaataaattctgcac

SEQ ID NO: 816 - DNA, 1103 bp, Butyricimonas faecihominis
gttaattgggatgacaattgtatttttactaacacatataccagacccgcgtataaacaaacgtattgaaattgcaaaacgttctaataaagttatagttatttgtgtccgacgggcttcacaagatatttgggaaccatattatcaagatatcattcatgagattattcatgtggatctcccatctgcgagacaaatctttaaaagaattcttgcttcttcgaaatatggaaatgtggctaatcgacttttaaagaaatatagaccagatattatttatacagaaggactcgattctctttcaattgctgtccgatacacacgaagggcattgtgcaagattatatatgaagtagctgatttaagggagagtttcattgaaacaccatgttcaataactgctcgtatattgacacgtttcataaaaaataaagaaataaatctttttaggtatgtggataagttggtaatcacatctgaaaaattttatgatattcattacaatcgtttgatttctaaagataatgtgatattaatgcctaatattcctgatgaagagccgttaaaaaattattttaagaaaaaaaatggaatgtttactgttggttttatcggtggaattagatatttgaaacagatgaaaatgttagtggatgctgcagaaatagttggatgcaatgttttgtttgcaggagcgggtggaaccaattatgattacgagcagataactgattattgtaaagacaaacggtacgttacatttactggtaggtatatttacaacactgatattgcaaaattgtatggtatggtggattgtgtatatgcggtatatgatgcagataatccaaatgtgagaatagctttgccaaataagttgtatgaagcggtttattgtaatttaccaattattgtagctaaaaatacttatttgtctcaagtcgtagaaaattggggagttgggatatcggttaatcataatgatacgaatgatttggtctacggattaaagaaaatgataaatgatccagaattttatgcttcattatcaattgcgtgtcaatcaaaaaaatatgagataagcaatgagaggtataatgctg

SEQ ID NO: 817 - DNA, 1094 bp, Butyricimonas faecihominis
ctacatagacacttctttttttgcataattttgtattgcttttaatttagagaaattaaattaaaattcagagtggggaaaatgtactgcaatacatttccccttttaatttactgcatcacttgattcaaaatcttcttgtattccttattcttattatactttttcaaataatcttttaccagtttctcgatcacgttaaaatctccattggatgtgattgaattgtacaaaagcacgaataatgccgcatcctgcaaagaccccttgtaaaaagcagccatatccttatattgatcttccaaggaagtcaacggctgatagtccttcccttgatcatgagcctctttacgacgcatataatctttgtaaggcaagagaaaagccatatacacccgattcctcagcgaagcttcatccgtccggagcttgtaatcatccaaagccgtccaatagtcctcggccagacaatcctccaattttttcttgtgaaaatccgcactcgcgtaaggataggaaatcagattcgtcaacaaggtcccttcaatttgcgccatcgccatattatacacccgaggatcaatctgatcttttacctcatttataatcttctcctcatccttcacctcctgtaccgttgccgcgtgaaacttcttcgcatcagtccgagtcaccagcatggccgggatattagttttataacgacgttcccgctgcaacatctcctttttatttatagcggaacagatagcgaccgctgccggggttccggagaactccaccgactcgtaacgttttccatcgtaagtcagtttcacatggatagaatcccccggctgtaaatacatctcgataaatgtattcaacaccaacgtggtcacatcgtccaagtccacggtaaactcgatcacctgcccctccttatacgggaattccatattaattccctctttctcaaggaaatcaaaatacacttgatcccgcacatacccgtaaatctccgcactgatcacggtagcgcgttctttggcctctgccggaaaagcaagaatacccattaatcctataatcaaaaatatatatttcatgtattc

SEQ ID NO: 818 - DNA, 1088 bp, Butyricimonas faecihominis
gttattattttcttcttcaagcatctcaaataaatctattctcaaagcctcacagtaattttttaaatctccatacaaaatatctatttgattgtcagcgagggcagcaaagtttacaatacgtttaacttcactaatgaacatattgcgttctataccgatagaatcattcatcacatttggtggcgtaacaatcaaatcccatattttcgccttatcttttcctttactttttcttagtacgcgtccacgacgttgaacaaattgacgaggattacctgtacttgaacagaatatcgcatgttccgcacgtggtatatcaacaccttcatccaagcacttcattgaaagcaaaatttgaatatctccttctgcgaaacttttcaatatgcttggagcatcatcaagtccactaatgtatttatgataactgtacccttgatctttaaacatctgtgcatactcgtctattatatgaatatcttcttgatcaatgttatacgaatctctttcggagtaatcaggctcatatccctcaggcacaaaaacaaaagtataatcaagtttacgcttttgttttaggtcttctagtaaattagaaatcgctactttcttattttcagccttatgtataattcttttacgcttcagcaataatttctcggcttcgggtcgatattttcctgtatcaggatctataaacttccttaactgagttgagatatattcatactcttccatttcagagtctgttaactcaacgaatatggggtaataatcataatggcataatatgttttcttctattgcttgtttcattgtatatctatatgtatactctggtggtctagaattgaagaactcatataatttttcagagcctatatcatcatatatacgttcaggtgttgcggacaagcctatacgccactgtatattatggggtaaatgttttaatgaacttggagaacctatattgtgtgcttcgtcagctacatacataaaggtttctagtcccttaaccttattaataaactgttgtatatccttgcggttaaatgtcgcatatgtcgttatgataataatac

SEQ ID NO: 819 - DNA, 1078 bp, Butyricimonas faecihominis
tcaatggtttgtgggaagatggaaacacacgtgggatggtgtgtagtgatgaagtttcgaaggtgttgtagttttgtcgttagaaaaatgagagagagtattcatttaaaaaacgagaaattatggcatcatttaaaaatgattttggattaaacgggaaattgggggatgtgattatttatcaaataggtaacaagtcgtatgcaagaagaacgtttcgagcgaataatccgaagacaatgaaacaacaggaagtgagggcgagatttttagttgcaatccggttttaccagaagttgaaagagacttcgttaaggagaatattgaaggtgtctgctcaaggaaacagtttcaatggttatacgttttatcttgaaaaaaatatgaaggtgttctgtgcggatgggcgtatcggagatttctctcaacttcagttttccgcgggaaagaggcaacgagtgtttcatttaagaggagggattgatccggaaggtcgtgttttattacaatgggaaaaggtgggtggacgaggatttgtggaggatgatgatcgtttgatggtggtcgtgttacatgaagggcgggcgttttgtccgagggtgttggagaatatagggggagtgcggaaagatggtgtggcgagttttacgattgacgggtggaagggggaaacgttgcatttgtattgtctctttatttcgcctgatgagaagcagttatctatgagtcagtatgtacgtttacagggaaggaaatgaaaccgatagcagatgttgtcaatgctattagcggggtgattaatggcgtgacgctcccggcacgggagaagaaagagttacaggcggagatactgagattggtgtacgagcgggaacgtgaaatgattgaagctcgggctggcgtgataagagccgaggctaccggaaattggctacagcgttcgtggcggccattggtgatgttgatatttgctgttattgtgcttattggcactttcacgagtttgcccatgttggcggatacttcccggttctgggatttgctggagattgggttgggcgggtacgtggtggggagg

SEQ ID NO: 820 - DNA, 1077 bp, Butyricimonas faecihominis
acatataatactaatcgtaatttcattgttttccattgttgcaaaagcttcaaattaaacaatagaattattgattaatacaacaacaataccgctaccaataccgctaccagtttacttccacatcatgaaaactcaacagggtcggttggccgagcggttaggcagcggtctgcaaaaccgtgtacagcagttcaaatctgctaccgacctcagaaaatcagccacttacaaagtggctgattttgtttatggagtgtttttgaccaaaatagtctaaaacctttaccaaaaatattctcaaataaacaaacaaaaacatatcaattcacgttcatgtctacaatgaatcactcaaagacataaagaacatgaagaagaaaagaactaatccttggaagattgtcggaattattatcgccatccttttactaatatattggctattagcagcaacaattttaggagaagatgaaaacgtagttcctattctggatggaacagagcaggtaatcccataggattcctgctttttttctctttattttcgaatatttacatccatttttttgaaattattgcatccagagatattcttcccgcacctgtgaaaaataataagatgtagatacctaaatataataaaggcaattctttcatctggaatggatcactggcatgaacgataaatataaccaccaacatagaaaatatcaatggaatcgtagccaaccgagtaaaagcacctacaataacaaacaaggaacacccaatttcagccccaataatcaaaattaaagacaaagtacttcctaaacctataggatccgagaaagtagcagacaattcggagaatgacgtcaatttagccacaccatgcgtcaacattgttatcccgacaagtacacgcaatattagcaagcccaaactcaagaatttccgattcgggactactatagatgaaatcacttttttcataacaacatttttaaagatttaaactctataggttaacgtaatacattttattaatgttgcgtttttaagtacgaatttataaatatagtagttttataa

SEQ ID NO: 821 - DNA, 1077 bp, Butyricimonas faecihominis
tgaatacagagaacgatttaatgcgtttaaaaattatctttgtaataattccaatgagataaaccgacgtgaagctattttgaaacgatatttaaaaaacgacatgaaaatatggaaaaatgaagataatccattcatatggatgattcgtaatattgaaaaacgtgttgcaccaacatctgcacctaaaatgacaaaagtcattaaagactttgaagaatattgtaaaacaaaagaaatatatacattagaaagtattaatctcgattttcttgaagaatatagagaaacattgaaattacttcccggtaaacgtaaaggtacactcatatctattaacggagtaaattacaaaatgacaatattagttggagaattaagagaagctgcacgtcacaatctttttaattacaatatgtcaaatattgctttgtataaaccacttccagaaaaagttaaacaatacgaaaatcaaatcgcattaacattggaagaaataaaaagaataatggaattagaattaagtggaacatacaaagaaataagagatgctttcatttttcaaagtttcgttggacaacgatttggtgacgtaaaaaaattcaataatacatttattagaataaagaaagatgataaggaatttcttcaatttattcaacagaaaagaacacaccccgtatacattgaagtattacctcctgtagccaaaataatagataaaaacacaatgaattatcatagccctgctacagcaaacgattatctaaaaaaaattgcaaaattagcagaaataaaaggggaatatccgtatacaactcataccaaaaatggaattgaaacaaaatcatttcctagatataaactaattggcacacacaccgctagaagattttttattacgtgggcaagagccaataaagttccagacaatattatcatgaaaataacaggacttaaagacaaggatatgttagaacgatatgataaattaagtaatgaaaatgcagcaattgaagcaggaacaatattgacaaaaagtttaaaaaaagaaggacttatcgaaaataatagttc

SEQ ID NO: 822 - DNA, 1075 bp, Butyricimonas faecihominis
gaagtaagctatttaaattactaataatcaactgtttacaaattaaaccactaaaataacacgtacagtaaaacactattaatcaacatattagcaatgtttagcaataatatataactccatttttgttgctattttgttgctcggaaatatttgagcaacaaaagtaacaaatttcatcatcttattatacacacaatgtatggaaacaaaaaaaagacattaagagaaataagtaaaaatcctgaaaatatgactgaggaagagagaaaagatatggcagagctttttgcatctcttaaagaagtaggaaaagcatgtgaaccatatgatattaagactattcgtaaaaataccgtgaatacactctcaaaacgtttctatcaagaacattttataatgtctgctgtattagaatcttttttcgttaaaaatgagatttcattcaaagagcttaatgaaactattgttaactatattcctaaagaattcacttggaatatttccgtagctcaaataaatctcattatttcaaagatgataagattagggttagtagaaccaatagaaacagataataaatatgctcccaactttaaaattacagatgatggagtaaaagcatatcaagcgcacacattccaatcattagcaacttcatcattctttaactatcaaacatatagaatgtcgatattaatgatgatagtcacaatcatatcagtcttagtggctattctatccataatagtaacgatttatgtcactaacaaataattaatgcaggcttgtcaataaacctatttatttttgttgctgagttgttgcttcgaagagggtttttatatcataaaaaaacttattatcaacaccataacacccaacttttcaaattttgcatcggtaagtagtctgacacactattgatctaataaattgggcgctatagataaagcatctcttttagcatatgccaatccaaatatagtaaaacatgaagtggattacatcaaccgatattaaacattgggcaaatagagaaaatgaaattttagagattatacactaaaaacat

SEQ ID NO: 823 - DNA, 1071 bp, Butyricimonas faecihominis
ttgttttgatgaaagatacagcgtggattgaaagcaaagatagttgtgtctatcgagtggaagggtatgaccaattgatctcgaaagagaaattcagacattatattgtgatacgttcgcgatctttggaaagtgcgtggttggactggttgagttggtcggtgcttcctcgagaaattcgtccgtttatcaaaaagtgtgagcccggtctaccgcgtcccatgtttgggcctcgtcagctttttgatacttatagaggtttgatgttagagtttgttcttgatgggcatggaaatattataaccgtatttttttatgtcagtaaagaaatacgtgataagataacggaaaagcatctgaaaaagatgtataatgctataatgaaacacaaaatgcccttgccagtagtggaggaaatcttggcttcacaccagaaattttatgaatgggatgatctgtcaccggattcgactcgtatcgggtgtatggtagatatgggcagcgagatagaatttttagaagaattgaaaaatttcgagtggcaggagttgagagagatacgggaagaacgtgagaagaagtggaaggagtgggaagagaaggagtggaaagagggaaggtttaggctataattgatgaacaggtgttgagagtgtgttcctgtatggagtggatgatacggttctcgttatggattatatcaattttttatgtagggtctatgaacgggcgattagtaaggaagagtttgtatcagaatttaatcgttttgcagagaaatttaaggcttacacggggactgaatattctcctaatggtaccccgtctttaatttttagcttgtggccgtttgtatggcattaattagataaaaagagatatgaggaaaatattttttttggtgattgttttgtttgcaatgcagcacctttcagcccagaaatttgttttgatgaaagatacagcgtggattgaaagcaaagatagttgtgtctatcgagtggaagggtatgaccaattgatctcgaaagagaaattcagacattatattgtgatacgttcgcgatcttt

SEQ ID NO: 824 - DNA, 1068 bp, Butyricimonas faecihominis
aagctggcaggaatgctctcctaccggttagctcatcactaaccccacggcttcggttgacagtttgatgcccgtgtattatccacgcgggatcgctcgactagtgagctgttacgcactctttaaatgaatggctgcttccaagccaacatcctagctgtctcagcgatcccacctcgtttgatcaacttaactgtccatccgggaccttagccggtggtccgggttctttccctctcgtccgcggaccttagcacccgcgggctcactccatgatttcgtgttccagcattcggagtttatccggatttgataggcggtgaagccctcgcgtccaaccagtagctctacctctggaacagaacatcacaggctgcaccgaaatgcatttcggagagtacgagctatttcccagtttgattggcctttcacccctacccgcgagtcatccgaaaacttttcaacgtttaccggttcggtcctccatcacgtgttaccgcgacttcaacctgctcgtgggtagatcacaaggtttcgcgtctagcgccaccaactcgacgccctgttaaggctcgctttcacttcggctaacgggcctgaagcccttaacctcgctggtgacgactaactcgtaggctcattatgcaaaaggcacgccgtcaccatatttcatggctccgaccgcttgtaggcgcgcgggttcagggtctatttcacccccctgctcggggtacttttcacctttccctcgcggtactggttcactatcggtctctcgggagtatttagccttgccaggcggtcctggcgaattcaggcaggatttctcgtgtcccgccctactcgggatcccgctatcttcgaaagaggtgtcgtgcacggggctgtcaccctccacggcttacctttccaggtaattgcacttcgtcttccgtcgaatgtcgcggtcccatgaccccgctgtcgccgaaacggcaacggtttgggctcttccccgttcgctcgccactactgggggaatcacattttgttttcttctcctgcgggtaatgagatgtttcagttccc

SEQ ID NO: 825 - DNA, 1068 bp, Butyricimonas faecihominis
ggatttaattctaaaaaacttgttatttataatggagtaaggattctaaatgaaaatagattgataaaacctatagataaagagattaaaattgtttatgtaggacgtttagaacgggaaaagggaataattgaggctttagcggcagtaagacaattgtcctgtcctgttcgtttttatgtggcaggaacgggagttttagaagatgtattgaggtctgaagttgagagtgagaaattagaaaatgtatatttgttgggtaatgtgacaaatgtttatgagctactttttgattgcgatatttttattttaccaagttattatgaggcaatttctctttcaatattagaagctatggcgtgtgggcttcctgttttggcaacgaaagtaggaggtattcctgaggctgtggaggagaatgtaaccggaattcttgttcctcccatgaatgtgagttttttgaaacaaggattggaaaagttagtaatggatgtatctttgcgtcagcgaatggggcaggctgggagaaaaagggctaaaaactattttaatattgagggtactttagcatctattcgtgcgcttttaaaaaacatataaaaatgattattggaattgattttagatttggatataagagtttgaggggaatgggaacatacgtacgagaaatcgtaaaatgtctggcaaaattagattcctgtaataaatatatcttatatattgataatgcagagccttgtgaggaattcaaatttcctgttaattttactttttgtaagttgaaaggaggttattttagttttgaacaatggtatttgcctcgtcaggccaaaaagaatggagttgatattttgtggtctccgtataatacatttcctctttatatcgcttcaacggtgaaaagatgtgttacgattcatgatttgatttttatgggaaaattatttccgaaatcattacatcaattattagggaagtattatcgccgttataatttattattgggactaaaaagggtcgatttattatttactgtttctaattattcagcgaaagctattcaac

SEQ ID NO: 826 - DNA, 1067 bp, Butyricimonas faecihominis
ttacaagaactatgaagattgggcaaaccagtatattaatttacttactaacaagaggtatggtaaagcatttagtatgtctgaacaagaatttatgccttatataataaagcaaggatacgctactgatcctaattatataagtaagtataataaagtacttaatgaagtaaagaaatatgaagtaggtgggaagattcagagatttaaggatgggaagcctgttaagaaagcaatgactaatggcaattatggaactaatctgacaggttggcaattctttaaaggtagaatgatggattcacctttctttggggctttatgtgcattaggtttatgtacaacagaaaatgctccagagtacagaagaaatttgctatataatagacataacccttctggaaatgaagcaactgcaatagtagattatttaaatttagagggagctcataaaccaaggcctaaaagtctctcaggcactcctgcagaagaagcattttatgctagatatcattacttaccacaagacttaataaaaagtaccaatattagacgtcctaatggtaaagatgataatttaaaagatgctgaatttgtaactactactaaaggaatggatttaagaatgcaagcattagctgatactcttaatctaggtaaattagctagaatgtccccagaactttataaaaagctacaagaaaaacatgaaggattagttgatcaggaagatctaaaaaaatcatatgcattttctaaagatttactagatcatcctaatgtgccaaaacaagcacatgaagacttatctattaaaaaggaaaaaggggcagacggaggcaactatactggattaggagcattaagatactatggaatgcaatgggatgataaggacaagcaaatatatggttgggattcttataacttcgactggtggcaaagattaattggtagtatgcctgctagagaaaagagtttggaaataagaactaaaattccatttgatccaacaaaaggttctaaattattaagagataatttgcaatattttgataatgaataag

SEQ ID NO: 827 - DNA, 1064 bp, Butyricimonas faecihominis
ctttatagttgtaaagataataacctgttccttgagtagaagccatcccgaacaccatatagtctcctgctttacattgactacatgaccaacccgtagttccgtcaaagttcatttttttgacagttttattataaacatctatttcaaatgtttgcattgatttgtcatttacataatcaggtggattactaacatatcccggaacattgaaatatccatatagcttaccatttcctgtatatgttttgctataaatataatttgctttattaccctttatgtccggtatactaattgtttctattgggaaatagtatgactgatcaaagtctgtttctcctttctttatacgcaagaaaccttctgtacagtttgcaaaatatccgaagcctcctacacaataaatataaagatcgcctttttcatcaatgaaaggatcacctgaatactcataagcggttgccattgtagctctattatcagatatcattttaataggcttgtctgtctttgtatcaatcaaaagtacataagctccagtattagggttaaactgggacttatcttgagctaatcctacatataaaataccatctctaataaccgaagcaccaggttcaggatttttatcaccactttctttcccaattgcatattcagataaatctatttcacctgttttttgcattgtcgtaggatttattatatacaattttcccaatcctacgcatgatatataagctttttcttctgaatcaaatgtaaggaatgcaggaagagaaccggaagggagaatcatcgtttctttttcttgaattagcaaaccattctcgactctgtacttatataaacgggcattcatcgattctaagacataaatgttacccccataagtaaaaagaaaagattcttttgcaaagaccaaagaattttgtgtacttgtctgttctacatttaaatctttaaatagactaacataagcattatcacccaccgtgacactatgaacaaaactcatatcgtcttcttcatctgttggaaacggatcatctttactacat

SEQ ID NO: 828 - DNA, 1062 bp, Butyricimonas faecihominis
atatttaatagtttaatgtaagtgcaaattttaaaatctatcatctaattatttatatcattaaacgatcgttaaaaaatatagaagaagggacgttgttcgttccattttgacttatttgaagggaaatatgacagatgatcaaaggaaagaatttgatgagtggctcggcttggatgagaggaatcaaaaattatttgagcgattacagaatgttgattacgtggagggaggattacgggaatttcaaaagtataattctgtggaagattggaaaaaacttcaagctaaattgcaggtctctcgtcgaaaaattggtaattggatgcgggtgagtgcggcttctgtgatgattttgttttgtgtgggaatggtatggtattttgtaggacgtgatatgaataatgagaatgttacttcgtctgttattgaatatgggcattcgagagcgatgttatttttggctacaggagaggtgatcgagttagaatcaactcaagatacggtatgtactaggattgagggagagagttttatgaatgatggtaagagattggtgtatgcggacaccacccggataaaagaagtggaatggcatacgttacaggttccgcgaggcggtgaatttgtgttgtgtttgtctgacgggactgtggttactttgaatgcggattcaaaaattcattatccggatcattttatggggaaggatcgtcaagtttcattagaaggggaagcgttttttgaagtagcgaaagatagtttgaaaccttttgtcgtgaaaacaaacggtattgatgtccgggtattgggaaccgcttttaatctgaaagcatatccggatgaacatcaacaaactacgttggtacgtggggctgtggaagtggtgttggataaacaacgggtgttattacatcccggagagcaagtgacgtgcattgataaggagttaagaattgaacaagtagatgtaaggccttatatagcttggaaaaatgaacggtttgtttttgaaaatgaacccttagagggggtcttgaaaaaattagaacggtggtataa

SEQ ID NO: 829 - DNA, 1060 bp, Butyricimonas faecihominis
acattaaactattaaatattagcgcattaataaaatatcaacttgctccaaaagcaataaaatagattgggatgaaggcaaaaaaggaatataaaaaaacgatcgttttttcatttactactaaaacagattaagtcggaaaaggatgacaaaaaaagtaaattatttttccatatttgcttggttcgtttgtttatcgaactaatcgtcataatattctttgctataataagcacgaaattcaccttctctattcaatcgtgctcccgcaatacgcatttcccatagaacattaaaaacatgacctgattgcaaaaccgttaatgacaatgaacatcttatataaaacgatatcttgccttgaccatcaagaactgcatcgctctcgtttatcgtacaatcagaggtataaggacttaaagaaactcgctcatcacatagtcttgcatcattattctcaagcatacaactagaaaaaaaattgatacagcaatagttattgattggaattatccctgcaataaccacttcccaaggatctacaatacacacatctccagtaccaaccacataattaacttcttcagcattaggaattacacctcttgtccctaccaaaatctcggatcgttcatcaatcatagcgaataaaccttctaactcatcaagagttagaaccacgcaagaatcaggtaaaacatccgttctgcaatattgaattccataattttgcttcaatatggataaacgattttctacatcatttctatcaatagcatcttttgtacaactaataagaccccaaagaacaatcccataaataacatttttcctcttcatgatcattaaatttatagtaataattatattacagattttctctcaaaattattcccttaagtttattttccaactaaacttatcacgatttcatcattcccgaatctctttcatttttattgcatctacaaaaaccttattaagccctttaaaagaaaataaagaaagaagttcttgtttatcgtactgaataattttaatacaatcaaatacatcgtat

SEQ ID NO: 830 - DNA, 1060 bp, Butyricimonas faecihominis
gggtaatacttatttagattgggctaaattaggattatcagtagctcgtccagaagctggattcgtattaggaaccgctgatgctggaattgctgcatataataatgattggaaaggtgcaggtatacaagctggattagaattattaccttatgttggtaaaattggaaaaggtgttagtaaagtaatacctaaaaagaggtttggtaattattccaaaatagatataactggatcaagtactacagctgaaaatacagcagcttttactaaggcaatggatgatgtatatgatcaagtatatttaggagataaagtaacacgtgtagatccaactgcacagaaatctagagtaaaaattaacccagatattcaagctaggattgatagattaggtttgaaacctagagagcattctcaaactactatagacaaccaggtaaataataaattagaattgttagttggatatggtaaagataatgcaaatatattggctaattactctaataaaccaattactaacatagatgaaattaataatatgttacaaaagattaattcagaaccagatgtaggaggattattgagtaatggaaatatagtattactaagtaacagatttacgaaacctaattatagtagtgaacttattagatttaattcattccatgaatcagcacataaattataccagttattaagaataagtccagatgtaattccttttaaaggaggatatcctgcgcttaatccaaagcatcctataggtcaacatttaagaggtttgcttagcaaatctaaagattggactagatcaggagaagaacttgcagctgatgtatggggttggagaggtgttaagaatataggatttaaagatttaactccagaacaaattgatatgatgttacaagatccacttataacaagacactttagtgaagatgctttaactaataaattagatgcagtgaagaatgcactaaaaatattaccagcagttggtggtgtaggagtgggaattaataatttaaacaaaaaataatatgtccaagat

SEQ ID NO: 831 - DNA, 1057 bp, Butyricimonas faecihominis
ctccagaaaggaggtgttccagccgcaccttccggtacggctaccttgttacgacttagccccagttaccggtattaccctagcccgttcctcgcggtcacgatcttcaggtactcccggcttccatggcttgacgggcggtgtgtacaaggcccgggaacgtattcaccgcgccatggctgatgcgcgattactagcgaatccaacttcgtggagtcgggttgcagactccagtccgaactacgaccggctttagagattcgctccgggtcaccccgtggctgccctctgtaccggccattgtaacacgtgtgtcgccccgggtgtaagggccgtgctgatttgacgtcatccccgccttcctcgcaccttacggtggcagtctcgacagagtgcccggcttcaaccgatggcaactggcgataggggttgcgctcgttatgggacttaacccgacacctcacggcacgagctgacgacaaccatgcagcaccttgtatctagccccgaagggaattcctgtttccaagaaatgcaaaatacatttaaacccgggtaaggttcctcgcgtatcatcgaattaaaccacatgttcctccgcttgtgcgggcccccgtcaattcctttgagtttcatcgttgccgacgtactccccaggtggctcacttaatactttcgcttgaaccctggcagtgtatcgccaagatccagtgagcatcgtttacggcgtggactaccagggtatctaatcctgttcgctacccacgctctcgcgcatcagcgtcagatcgagcctgggaagctgccttcgctatcggggttccaagtgatatctaagcatttcaccgctacttcacttgttccgcctccctcgtctcgtctcgagggcgccagtttcaacggcgtgctacagtttagctgcagtcttttaccgctgacttggcgtcccgcctacgcgccctttaaacccaataaatccggataacgctcgcatcccccgtattaccgcggctgctggcacggagttagccgatgcttattcgtcaagtactggcaa

SEQ ID NO: 832 - DNA, 1056 bp, Butyricimonas faecihominis
ctgatatagaatattctaactacctgttcaggaaactgcttaataaacttacagaagatgcagcttggacatctgataaaacgaaattaggtttgtctttgtttgttaatgaaggcgaagatgtaaatacaattttatcaaatcattctgaacagaattgtattgaaggatttgttaatggtggtccatatgataaaatcaaaactattgctcgaactacagatgtttcccaaagagagcaattaggtcgagataaaatggtaactgaaagattttatatgtatcttcatttaccgcttggttcaaaaataggattattgttaattgagaagaaaggaagtttgaagataagttcggctgtacaatttttgcttatagaattattgaaaacgcatcgttctgctgtgaagtttgaaagatttgtacctagcagtttgattgaagaatataaaaatggtagtgttgttgatacattaacctttactgattatatgacaacaagtgtcgttgatgaagaaggagaagaccctatcgaaaaacagtatggtatctctataaaaattactcctccaaatgaagataaaacagattttgatctggttaataatatgttacatgctctgagaggggcatcaatgaaattaggattggtaacaaagcggttatctgaattttctagaaagaatgggactttgaaaaaagagaataaaagttattctttttctttggggaatgatttgaaaataaagccaatcattgaaattgaagatcgttttcaagatgcagagctgggcaccttgaagagggtagatattaaatctatgtgcgatgagcttttagggcaaattcgtcatgaaatatacacagtatagaataatattgttatgaacacttcaaatttgttattttacattctcaatctaatttcagaagggcaaaaatggcaatatcagaatgctacatgtaccaacacaaaacctaaattatattttacgactttacaatggattgctattttattagcttccatttttgtattaacaaatcattctggat

SEQ ID NO: 833 - DNA, 1055 bp, Butyricimonas faecihominis
cgttgcttttatttagtcttaaaatcagaaaatgtattgaaaaacaaaaaagtattcgagagagtatcttacccggttcgttatgccgtgatgatatggtttaccgggatcgtgcgatacttcaccgaacacgctatttaccgggtgttattttccggtaccgaggagcaaaatgaaaaaattaaccttggtatgactgaaacgatcatgtccctttcgcttgttggtttcggtacgaccgccgaaatggagcgggtatcggttgtcgattatttcgatatgcaggtgaaggcgttgaaaaaaatgatctcggatacccgaggaggaggggcaacactggatgatatgttcgtaaacagactataatatgaaagagaaaattgatgcgttgaaagagactttttttattactgccggaatgggcggatcgctataattattttgttgagctgggggaatctttacctgcaatgcccgtggcatttcaagtaccggagaaccggattgcttgcaattcgatgttgtatttctacgtgtgccatactaagacctttgctatatatttgcttctgccaatgccgtgatacttgctgggttggccgctatgctttttaacctctgcaacggggtatcatggaaggacatccgggataatatgccgtatctacttgctaccttaaaagaattggggttgattgataatctcacgctgtcgaggcgtgtggcactattgacaatggttgagaaaataacgaattcataaaaaatgattcaacgaatattttgtaataaacaaatgtttatctatatttgtagtgtaaaagtttctttgaaatgttttcctatgaagagctaaaggctcggatagaacatgagaaaaatagtcttaggttctatgtcctttactggcatattttgaaaaaagatatgtcggaagaggaactggagagaatgattgactttcatttagatcgtttgatcgaactacttcggttgaaaggttgacaggaagctctcgaaagagggcttcccaaagaaactttacaattttaaat

SEQ ID NO: 834 - DNA, 1051 bp, Butyricimonas faecihominis
tatcagaattaattgatcaatatttgatagaggataatttacgtccttggataataggttttagtggaggaaaagattctacggttttacttcagttagtgtggtatgcaataagcaaaattccagaagagaagagacagcgttgtgtgtatgttgtttgtaatgacactttggttgaaaatccaattatagcaaaatatgttgataatgttttaggaaaaatacagactgctgcggtttgccaagatatgcctatatatgtgaaaaggacaattccgcgattagaagattctttttgggtaaatgttataggacggggatatcctgtacctaataatacttttcgttggtgtactgataagatgaagataaaacctacgtctcgttttttgatagaacaagtagcagaatatggagaggctataattcttattggaactcgtagtgcagaaagtgttaatcgtgcaaaatcaataaagaaacattcgttacgtggcaaaaggttggctaaacatccgtataatccgaatacgtatgtttattctcctataaaggacttgatgttggaggaggtttggtacataattaatgcgatgacttccccttggggggcagataattcaaagttatttcaaatttacatgaatgcaagtgcagacgattatgaatgtcctacaattgtaacggataacagtcatggggcatgcgggcaaagtcgttttggctgttggacttgtactgttgttaaagaagataaatctttaacagcattggttgcgaatggagaggagtggttaaggcctcttttgcgatttagagaagagttatttaatggtcgtaatctctccaagaatcgattgtcgacacgaaggaatggacaaattgctgtttctaatgatggtcataatcaaggaacatatacgccagaatatcgtattaagttgcttgaaaaattgcttatggctcaacgagaggttcaatttgagcgatctgatatcgaattaataaataatcaagaattagttgcaattcaaattgtatggaataggga

SEQ ID NO: 835 - DNA, 1044 bp, Butyricimonas faecihominis
gtgttaatcttctttttttatttttttgagaataagtttaaatcaagttggataattattttttcaacaattggtctgtttttattgaggatcatagatcgttttaaaaataatttgcctttgttgggtggtaatgaagaacgaggagatatattaataaataatcaatcagaattactttatggaggaaatgctgttattggcagtgtgcgggaaatatttattagtgttgtggatcgtattgaattattaggagggtatttgattacctgtatattgcctccttcgttggtcccggaaaacatgaaatatcctcactatcttggaactattcatgtcgattttggaggaggtggtatcattgtttttgcattttacgtgatattagggatgatcggaccttttttattaggaatgtatttgggaggtacaattaattacgtgtatgagagtcgaagacccaattattatgtaatgctttttttcgtgctttcttttttcatgattactcgttggtattcttatgatcccaatttgttatttcgactttctttttatatgttatttgtttttgccgtatttaaattaattacaaaagctagttatggaaaaacgaaaagtgttaatagttagttgtacaaagttttatggtgggggagagatttttgtgagtagagtttttcctcaattagaagagtattatgactttttttatcaagtaaggagtaaagaattgtacgagatattaccttctgaatataaattttttgttgaacatgaggtttcctttaagcgagaaatcgcatttgcgagaaaattgattcgacaatacaaaatagatattgttgttttgaatgggaatcgtgctatatatatggctcctttcttgcctaattgtgtgcgtaaaattgcttataagcatagtagtgccgcttctacgatgtttattaagaaagggatttatcatgtcttgataacgttaggatttttgtgtagtgataagattgttggagtttctcggatggttgttgatgagataagagg

SEQ ID NO: 836 - DNA, 1039 bp, Butyricimonas faecihominis
atcttatattcctctttatttgctggattaacctcctgtataacatggtaaggagattcatctatattgctaatccattctggtttagttactcaccctaggtaaaacataagaatcatcactatccaattcaccatattttttaataatttctatggccttgggtaacaatggcacttcaaaatctttacctgtttttcccctcttcatacttatccaaagttccttatcaaatcctttgataatatgcttttttttcaatgaaaatgcctcatggtatgccaatcctgtataaacactaaacaaatatagatctctcaccctagccaatctatcttgtgcaaattgataattttccaacaaatcaagttcttcctctgtcaagaaaactagttctttctctgttttcaatggcttatactcaacaaatggatcaactttcatgtaatcacatttaattccatattggatgatctgttttaccctctgcaagaccttattcactgtaataggagccaatcctttctctaacaataaatactcttcaaaccccaaaacaaaagaagaatctattttgagtaatggaatatcttcctgtttgtacttccatttgatatattcttgggtctgttccattatgtgcctaaatttccaaagagtatattttgcaaattttattccctccattttagatgcaacttcatatcttttctggaataattgaatgaaaaaatgagttgaagtgtccttgcctgtataaagattataaaccatctcaacaatatcatcaacttcttccaatatcaatttatcctctatatcagtcaatttcttaacaatcatgtttaaatgattatttattctctctgatccaaaatatcttggcttggctctttgctttacattatcccaatccctctctaaaatgctcatccctgttgtaaattgttttataacaacatctgattttagcctacaataaataggtgcttgacctttagaatttcctctggatttccacctaaaaaatgatatattt

SEQ ID NO: 837 - DNA, 1038 bp, Butyricimonas faecihominis
atgtaaggataaatccaagctgaataaagaagaaattaagaaacacttgcttgtaaattggaaacacgattattattgctatagtagagaatggccatataagggactaaaacatagaattcttgcagaatcattaattgctgatcctaaagaattaaaagaatataaatttttctgttttaatggtattccgaaattttatcaaagttgtttagatagaaataatgctattggtggggcaatattgaatttttttgatcttcaagggaatctgttggaagtgaaagatgcagaacattcccgagaatcattagaaattgctcctattccaactaatttgaataaaatgatagaattaagtcgggtcttgtcaaatggaacatattttttgcgggtcgatttttatgaagtaaatggacagatttatgtcggagaatttaccttctttgaaaatggaggattttgttattttattcctgagaaatataatagtatttggggggattggataaaattgccaacggattgaatttctataatgtgtaggaagagttgttctttttaatatgatctattctttggcgtttgctgtaattgccatattattgacaattttggtatccggttcatttgtttcgtgtagtatggctatatttacttttactctcggacatttgtattgtaatactgtaaattgttacgatagatattgggctcgtaaggcatttaatattgttttttctcttacaaccgtgtttgcatgtattcattatttggatacagttgtggattggaatgatttcgctattgattggaaagatgaatataaattttggtccttcacacaagggggaagtgctagtgatataggtggtttgttttatgattgttttattcgcagaattcatattacagatgaaggctatctattttatatcacggcattagcgtacgttgcaaatagtctttttgatggaaatcatctgttgttacaatttttagggagcggtttgtttgggagtcttgcttctattgtat

SEQ ID NO: 838 - DNA, 1036 bp, Butyricimonas faecihominis
ctatataacaatgtatatgaagaatgtaatgtataaaatcatcatgggctgctacatcgtggccgcccttgtgcttgtcaccgcctgtaatgacaacttggatattcagcaggcgtacccgttcagcatcgaaactctgccagtactcaaaaggctgaaagtcggggaaacagccgaaatacgctgccgactggtgcgtggcggctattaccagccgactacctatcagatacggtatttccagccggacggcaaagggaagctggaaatggataacggtacggtgttcctgcccaatgacctatacccgctggagaaagaaacgttccagctctactacacttcggcatcgaccgaccagcagacaattgatatttatgtgattgacagcttcgggcaggtgcagcaactttcgctatcgtttaataatgctaataacgaagaaaagcaaattttggggatgagtgtgttaataaaaactcgataaaatattgtcaagtgtttattaatagctatctttgctgataaaaacaattgcatatgaaaaaagaaatagcccaagttgcagtcgaacatatttctgttgaagagttatttggagtatattcgtataaattgccaaatacatctgaaaaaggaatagaaaagctattaattatttacggagataatggaactggtaaaacaacaatactaaaattgttcttttatttactatcaactagagataaaagtggctataaaacaaaaatagcggaaactcgatttaaaaaattcgttgtacaacttaaaaatggcatagagattggcgcaaaacgtgaatgttccacatgtggaacattcacatattacattgcaaaaaacaatgaaattttaaaatcgattgagcttaaagcagattctgacaactcaattcaattagatgctggttctaaagaggatattatatatcaagaaatactgaattatataaggaatttgaatattacaacattttatctttctgatgataggaaagttttaaatagtattacat

SEQ ID NO: 839 - DNA, 1028 bp, Butyricimonas faecihominis
gtacactctcgcactccaaacaacatatttttagtattataccgcttgtatgtataaaaattctgtccttcacctgtaaattcccggataaattccaacaagattctctcctctcgatcgctttctgtcaatggcacgtaagtcaaattgcgagctttacaatactcttcataaattatattcgcttcttccaatggtgcattctccgcaataatcaaatacatttctgctaatcgcacaatagggaaatttttttgagaagtagaagaattataaaaattcaaatatttccgacaataatatccactcgttccaaaacggttataataatatgcccaaaaccattgataccgcatatcttcagcgtttcctgcaaacaaatcctcaaaaaatgtatcactatagtttaaaatcgaaacattcctagctagccaagctgtaccctgcgtataatcataattatcacatttcactccgcaaagatgttcactataacatgtcaaatccgtagtcttattattccaaagtccttctgtagtattatcatctggtgtcatcaaacggaccttggcagttccatccccattctttgcttctttcaccagccgagcgtaacgcaacgcaccttccacctctcctttccataagcgagccctagcctgtaatcctaataccccataataatttatatgatttttacgaaaagaccaagaagcgcttgaaacttccgtttcctcaaaggtccccgtaacgacaatatccgatttctctaataatgcttcagcttcatccaaatccgccaacaaatatgtcatgtactcttcaaatgtattatattcgtaatctttaatatcattcacccttacataaggtaaatacttctcactcatatccacattcgatggaactggcccgaacaaacgtatcaaatccaaatgaaccaaagcccgtattgccaaggcttccccccgacctatattataaacctcatcctttaacttgttcttatttgtttctgttcctagtat

SEQ ID NO: 840 - DNA, 1026 bp, Butyricimonas faecihominis
cggtataacatgaagtatataaataatcgatgtttgaaagagtattttaaaattatatttttgacgttgatgaagatcgttaaatgatgtagggattacgtgattgaaaaagagatagtaccccggatgaaagttcggggtattttgttttgagggctattgttttttgtatgaaagtttcctatatttgtaaaaatgtttacgttatgagtacaaaagcaacaatagaggttgatttgagtctttttgagcagttgaaaaaatatgcaaaatctaaaggtcggacgatcacggaggtcgtcgaaaagcaattaaaaagcttgcttggaacagaggtaaaagacaagcctgtttcttcaaaattaaggggaattgttaatcttccagaaaattttgattataaagaggaattgaaaaatagatctttggaaaaatgaagcattattgtgtagatacaaatgtcgtcattgatatgttggcaaatcgtggtgaatttgcggaagcggcttcaaatcttatggatgctgcagggcgtggtgaaatttgcgtgtatatatcctccttgtcatattcgaatatatattacattattcgacgatatttggggcatgagagaacgatagaaagtttgaaagaattgtctaaatacgtgggaattcttcctgtaaatgggaaaataattcgtttatctcttgattctgaatttggtgattttgaggatgcaatacaatatttttctgctttgcagaatagaaaaatcgaagcaattgtaactcgaaatgtaaaagattttaaattgtccacattgccggttctacaaccatcggaattattagtttgataatttgtgattgtttgtaaaaagagatagtaccccggatgaaagttcggggtatttttgtacgatgaaaaagttgtagtaggtgaagatgtagctgtcaaatcggcaggaatttgggtttggcataactattgtcatttagttgtcgtaaaatttgaagtataattaaattaaaaatatagagt

SEQ ID NO: 841 - DNA, 1021 bp, Butyricimonas faecihominis
atcaaatacatcgtatcttcccaacgaaacccattcatcgctctcgctaccaacatcaattttcaaatcgaatgtatttcctccattacaaacagaaaaatacaatgtcttatcatctaaacttttttcatgcctagtatcatctacattatgaaaaaaaagttcatacttcccttgacgaattatatctatggtccactccacccgtttatcacctgttcccgcctctttataataggcactctgaaccggaaaaccatagaacttcgtgttgaatcctaccaaccattgattacgattcttttttctttcgcacaaaaaaggaatattcacattatacttttcaaacatatcctgaagccaagttttagtctctacaatcttacatctttcatcaacattatcaacaataatatcaagactatcatcttgaaaatacagggaatcaatatctcgaattccttcctttaatcccaactcatgatatacaatcttcttggcccgaaatcgtttaacagacggtatattctgagacatcggcatttctatcctataagatatacttgaactagttgtatcattaactacaatttccttgcaggaatgcgccggaatcaaataaaatcccccaggccttgtcataatcacaccaagcacatcactcatattatatattttaaaaagaaaatactgatttgcttgccatgaatcaatcaaatctccaacccgataacactcggcatccactttgaaaacaggtaatctattgctatcatataaatctggcaaaatatggtcgagatcaaccccacattgttccatcaaatccttactaaacatctttaattcaacattcataaaacgatatttagaaaaaaaatcatatataaaatcatcaaacttgtccctgaatacccgtgtacatatcaaagaatataactcccaacccttctttttaatgataaaatgcaattccttagaagacaaattcagatcatgaatagcctctcttaaactatgt

SEQ ID NO: 842 - DNA, 1015 bp, Butyricimonas faecihominis
caaaaaagcaacaatgatataatttatttgtacgttgtagcaaatgctctcatttgaatataaacaaatgtacgcattaatggagataatgcagaaaaaccatgaagcatatacgactcactgccactctccatttgtagatgtgtgaaagtaacaatccattaatggacaatagggtatataaaggacagatttcccgtatattcgtctccttattcctgaattatgagcgtaagtcacataattatggagagatatccaccctttaatggggagagctgtcggcaaatatttgatggaaatgccccgaaaatcacaggagaatagccatacaatgggctgatacacaataattattggataaacgtggtctgctcctgcaaacagcaagttgtcttttcgttaaacgaaaacaggacggtttaacggcggaaacgccgccaaaccgcctccccccaaaaagctccggagtcggctttgattttccttatgccatctctatacatttactttccaattacaggatttttcttgaatatcccataaatgagcatataatccctcatcttttaataattgttcatgtgtcccttgttctataatatttccaccatctaaaacaataattttatcagcatcacttattgtttttagtttatgcgctataactataacagttctaccttgtattaaagaattgattgcatactgtatttccacttcattttctggatctaaagaagctgttgcttcatctaataaaattacaggagcatcttttaatatagcacgtgcaattgagattctctgtttttctcctccagataaggtacatccaccttcacctatcattgtatcatatccttgaggtaaatgtattataaaatcatgacattgagcttttttagccgcctctattatctcattatctgtagcattctctttaccaaatcgaatattattctttatggtatcctgaaataaatatacgtcctgaaataccattgaaatgcgt

SEQ ID NO: 843 - DNA, 1015 bp, Butyricimonas faecihominis
tcctaatagagaggcgatctcttatcaaggagtttctttaacttatacagagttttggaaaaaagctaatcagatggcgcatttcttacgttctcttggagtggtacgaaattctaaggttgctttattactgaacagaacgcttgatttgcctatagtacaacttggaattcttttagcaggtggggcgtatgtgccaattgacccttcttatccttcggatagaatacagtatatgataaatgactgtggagcagaagttcttgtaactcaaggaatacatgtagacaatattaatagttcatatacccccaacattaaacattgtgtgttacttgatgatgattctattcctttacctgatacatatcgtcgatacaccgtaaatgatataaatagtcaatctatggataatatagtaccttgtaatactcctgatgatttgatttatatgatttatacttctggttcaacaggacaacctaaaggtacaatgcttaggcatagaaatgtatccaattttttgaattatgagaaagaagcgtttaatgtaaactgtaataacaggtttgctttaataacatcgtattcctttgatatgactgttacttctaattggctacctttcattgccggagcttctttacacattctttccgataatgcaactaaagatatagagaaacttctgtattttatagatgaagaaaaaatcaattttttgaatgtaactccctctcatttttcaatgttggtaaatatgttgggatttttggagagacctgtaaacctatcacccaatatgactattatgctgggtgctgaaattatcaatgtttcggatataaacaggtggttagaaaattatcctttgcacaaatttattaatgaatacggccctacagaaacaacggtggcttccactttttatcctatcccgattgaagaagacggcaaatgtcatttaaatatagttccaatagggaaaccgatttataatacacaagtatatgta

SEQ ID NO: 844 - DNA, 1007 bp, Butyricimonas faecihominis
gctattatagtgatatatataattttatctatcactatatcatggatggagatgatgcagaagatctagcacaggatgtttttatttgtttttttgaaaaatataaatcactgccggaaaggatcaattcgaaacaataccttttatctatcgccaaaaatcgatgtattagtttcctacgccacaagaatgtcattgaccggaataacctcaaatactttgaaaccctgttattcagtgccacctcagagtacgacaccacgtatgatgatttatttttaaaattaaatattgccatggacaaactttccgacctgcaaaaacaaatcgtgcaaatgaaattagccgggaaagattactcggaaatgtcggaagaactaggcgtaacccactcccaaatccataaaaacatcaaaaaagcttacgataagatcagacattatgttgaaaaaagtgaggctatcatgcttattctatcacctctattttcacttttacatcattaacggtacatccatccgtcttgaattctatgatcatcccggtatgagtccacatcgtctggaaatcccgatctttcagttctcctgcttttaaaggaaacgagcgacgggaacgaattccactagtctctccgtcctctcttatggtcaaaatagcatcacaatccaaggtacctttcaccgtgatatgtaacctttggggagtttctgtttcagtgttatagacaaaagtggccaattgcttattattaatagtaaacgtctgttcctcaacaactccaccagatgattgcatccacacgacgattcccagtatcaacatgattaaaaccgcaaaaacatatagaattcttttcaatttcttactcgtcataagtacctatttttgttataatgattattacaaagctagcaatttaaggtcaaatacccaaaaaattattatcatcccgtaaaactgcaagatgtatcttgcagttttattaaattattgctggttacatc

SEQ ID NO: 845 - DNA, 1001 bp, Butyricimonas faecihominis
tattacccatattataaaagaaatctactgcattctgtattttcttatctctattatatgtatcttgtaactctttgctaggtgcttgtgataaatatgttctattattaggtaatggctcttctactttcaacttaggtgtaagtttagatgccattctagtattatctctttgtacgatgttcccaccttggaacctctttactttcctatatttactatttttgtcaattaattgcatattatctatatttgcaattatgtattacttaaatcttatatgtttatggatttcctaattaaagttcaccacgcagaggatactacaacgtcagacaatatgcttgatttttggaagaagcattcaaataaatctcttcctaaagtttgcccttgttgtaaagagcccctacttgatcctgtaggtgctcatgttatagatagagcaggcataatgtatattactcctatgcgcagagaatgtaatagtgcacacaaaccagaagaatttagtgttaccaaagaagatttagtttctctacaactacattcttaataataaagaaaggaatgcttgttaatatttgccattgcagttctttttcatctgttttggcaaatatacaagtatcatctttctctacccagaattggtatataatttcatcttccttttggaatttactcatcggtatcatttctccaaattcttctaatcctcctactatacctattacattatttataatggtctttttccagttttcttccatattatttcattttatatggttttacatacatttcgttaaattcttccatattttctgctattaattcatctaaatttaatggtatattagcttcttgtaatactttaagaagcataggatcaatttcagacaactttatcatattatttcattattggatataagttagatagtctatttactactatacctaagcgaggtaaatcatttaagctatcttttattaag

SEQ ID NO: 846 - DNA, 1415 bp, Butyricimonas faecihominis
cgcggtcacgatcttcaggtactcccggcttccatggcttgacgggcggtgtgtacaaggcccgggaacgtattcaccgcgccatggctgatgcgcgattactagcgaatccaacttcgtggagtcgggttgcagactccagtccgaactacgaccggctttagagattcgctccgggtcaccccgtggctgccctctgtaccggccattgtaacacgtgtgtcgccccgggtgtaagggccgtgctgatttgacgtcatccccgccttcctcgcaccttacggtggcagtctcgacagagtgcccggcttcaaccgatggcaactggcgataggggttgcgctcgttatgggacttaacccgacacctcacggcacgagctgacgacaaccatgcagcaccttgtatctagccccgaagggaatactgtttccaagaaatgcaaaatacatttaaacccgggtaaggttcctcgcgtatcatcgaattaaaccacatgttcctccgcttgtgcgggcccccgtcaattcctttgagtttcatcgttgccgacgtactccccaggtggctcacttaatactttcgcttgaaccctggcagtgtatcgccaagatccagtgagcatcgtttacggcgtggactaccagggtatctaatcctgttcgctacccacgctctcgcgcatcagcgtcagatcgagcctgggaagctgccttcgctatcggggttccaagtgatatctaagcatttcaccgctacttcacttgttccgcctccctcgtctcgtctcgagggcgccagtttcaacggcgtgctacagtttagctgcagtcttttaccgctgacttggcgtcccgcctacgcgccctttaaacccaataaatccggataacgctcgcatcccccgtattaccgcggctgctggcacggagttagccgatgcttattcgtcaagtactggcaaaatcgcacacgtgccatttattcttccttgacaaaagaggtttacaggccatggaccattcttccctcacgcgacttggctggttcaggctctcgcccattgaccaatattcctcactgctgcctcccgtaggagtctggaccgtgtctcagttccagtgtgggggaccttcctctcagaacccctagacatcgtcggcttggtgggccgttaccccgccaactacctaatgtcgcgcgtgcccgtcccgtaccaccggaattttaaatgaaaaatcatgcgatcctccagtattatgggatgttagtccacgtttccgcgggttatctcccggtacggggttggttgcacacgtgttactcacccgtgcgccggtcgccggcgaagtattgctactccccgctgcccctcgacttgcatgtgttaagcctgtcgctagcgttcatcctga

SEQ ID NO: 847 - DNA, 1460 bp, Lactobacillus ruminis
ggatggctccaaaaggttaccccaccgactttgggtgttacaaactctcatggtgtgacgggcggtgtgtacaaggcccgggaacgtattcaccgcgacatgctgattcgcgattactagcgattccgacttcatgcaggcgagttgcagcctgcaatccgaactgagaacggctttaagagattagcttgccctcgcgagttagcgactcgttgtaccgtccattgtagcacgtgtgtagcccaggtcataaggggcatgatgatttgacgtcatccccaccttcctccggtttgtcaccggcagtctcgccagagtgcccaacttaatgatggcaactgacaataagggttgcgctcgttgcgggacttaacccaacatctcacgacacgagctgacgacaaccatgcaccacctgtcattctgtccccgaagggaacgttccatctctggaattgtcagaagatgtcaagacctggtaaggttcttcgcgttgcttcgaattaaaccacatgctccaccgcttgtgcgggcccccgtcaattcctttgagtttcagtcttgcgaccgtactccccaggcggagtgcttaatgcgttagctgcagcactgaagggcggaaaccctccaacacttagcactcatcgtttacggcgtggactaccagggtatctaatcctgtttgctacccacgctttcgaacctcagcgtcagttacagaccagagagccgctttcgccactggtgttcttccatatatctacgcatttcaccgctacacatggagttccactctcctcttctgcactcaagtcttccagtttccaatgcactacttcggttaagccgaaggctttcacatcagacttaaaagaccgcctgcgttccctttacgcccaataaatccggacaacgctcgccacctacgtattaccgcggctgctggcacgtagttagccgtggctttctggtcagataccgtcaatacgtgaacagttactctcacgcacgttcttctctgacaacagaattttacgacccgaaggccttcttcattcacgcggcgttgctccatcagactttcgtccattgtggaagattccctactgctgcctcccgtaggagtttgggccgtgtctcagtcccaatgtggccgatcaacctctcagttcggctacgtatcatcaccttggtaggccgttaccccaccaacaagttaatacgccgcaggcccatccaaaagtgacagcaaaagccgtcttttacatgaacatcatgcggtgttcatggttatgcggtattagcacctgtttccaagtgttatccccctcttttgggcaggttgcctacgtgttactcacccgttcgccactaagcttctttcggtgaatgcaagcattcggtgaaagaaagcttcgttcgacttgcatgtattagcacgccgccagcgttcgtcctga
